United States Patent Application Publication US 2026/0258143 A1, published September 3, 2026 (application 19/163,002).

The application's sequence listing, which the Patent Office published only in electronic form, follows.

SEQUENCE LISTING (5210 sequences)

SEQ ID NO: 1 - protein, 8 aa, synthetic construct
GRKFSTLI

SEQ ID NO: 2 - protein, 7 aa, synthetic construct
IERDGTT

SEQ ID NO: 3 - protein, 5 aa, synthetic construct
NALQY

SEQ ID NO: 4 - protein, 111 aa, synthetic construct
EVQLVESGGGLVQAGGSLRLSCAASGRKFSTLIMAWYRQAPGKQRELVATIERDGTTTYADSVEGRFFISRDNAKNTVTLQMNNLEPEDSATYYCNALQYWGQGTQVTVSS

SEQ ID NO: 5 - protein, 8 aa, synthetic construct
GRSFSTLI

SEQ ID NO: 6 - protein, 7 aa, synthetic construct
IERDGTP

SEQ ID NO: 7 - protein, 5 aa, synthetic construct
NALRF

SEQ ID NO: 8 - protein, 111 aa, synthetic construct
EVQLVESGGGLVQPGGSLRLSCAASGRSFSTLIMAWYRQAPGEQRELVATIERDGTPTYTDSVKGRFFISRDNAKNTVTLQMNNLKPEDTAIYYCNALRFWGQGTQVTVSS

SEQ ID NO: 9 - protein, 8 aa, synthetic construct
GRRFSTLI

SEQ ID NO: 10 - protein, 7 aa, synthetic construct
IERGGTP

SEQ ID NO: 11 - protein, 5 aa, synthetic construct
KTLRY

SEQ ID NO: 12 - protein, 111 aa, synthetic construct
EVQLVESGGGLVQAGGSLRLSCAASGRRFSTLIMGWYRQAPGKQRELVATIERGGTPTYADSVKGRFIISRDNAKNTVTLQMNNLKPDDTAIYYCKTLRYWGQGTQVTVSS

SEQ ID NO: 13 - protein, 8 aa, synthetic construct
GFTFSNYA

SEQ ID NO: 14 - protein, 8 aa, synthetic construct
IYSDGSGT

SEQ ID NO: 15 - protein, 15 aa, synthetic construct
AKGRNSGSYYPWDDY

SEQ ID NO: 16 - protein, 122 aa, synthetic construct
EVQLVESGGGLAQPGGSLRLSCAASGFTFSNYAMSWARQAPGKGLEWVSGIYSDGSGTYYADSVKGRFTISRDNAKNTVYLQMNSLKPEDTALYYCAKGRNSGSYYPWDDYWGQGTQVTVSS

SEQ ID NO: 17 - protein, 8 aa, synthetic construct
GRTFSWNG

SEQ ID NO: 18 - protein, 8 aa, synthetic construct
ISQSGGRT

SEQ ID NO: 19 - protein, 16 aa, synthetic construct
AASDFLLATTISAYDY

SEQ ID NO: 20 - protein, 123 aa, synthetic construct
EVQLVESGGGLVQAGGSLSVSCAASGRTFSWNGMGWFRQAPGEEREFVAAISQSGGRTRYSDSVKGRFTISRDNAKNMVYLQMNSLKPEDTAVYYCAASDFLLATTISAYDYWGQGTQVTVSS

SEQ ID NO: 21 - DNA, 333 bp, synthetic construct
  source 1..333: mol_type = other DNA
gaggtgcagctggtggagtctgggggaggcttggtgcaggctggggggtctctgagactctcctgtgcagcctctggacgaaaattcagtacccttattatggcctggtaccgccaggctccagggaagcagcgcgagttggtcgcgactattgagagggatggtacgacaacctatgcagactccgtggagggccgattcttcatctccagagacaacgccaagaacacggtgactctgcaaatgaacaacctggaacctgaggactcagccacctattactgtaatgccctccaatactggggccaggggacccaggtcaccgtctcctca

SEQ ID NO: 22 - DNA, 333 bp, synthetic construct
  source 1..333: mol_type = other DNA
gaggtgcagctggtggagtctgggggaggcttggtgcagcctggggggtctctgagactctcctgtgcagcctctggcagaagcttcagtacccttattatggcctggtaccgccaggctccaggggagcagcgcgagttggtcgcgactattgagagggacggtacgccaacctatacagactccgtgaagggccgattcttcatctccagagacaacgccaagaacacggtgactctgcaaatgaacaacctgaaacctgaggacacagccatctattactgtaatgccctccggttctggggccaggggacccaggtcaccgtctcctca

SEQ ID NO: 23 - DNA, 333 bp, synthetic construct
  source 1..333: mol_type = other DNA
gaggtgcagctggtggagtctgggggaggcttggtgcaggctggggggtctctgagactctcctgtgcagcctctggcagaaggttcagtacccttattatgggctggtaccgccaggctccagggaagcagcgcgagttggtcgcgactattgagaggggtggtacgccaacctatgcagactccgtgaagggccgatttatcatctccagagacaacgccaagaacacggtgactctgcaaatgaacaacctgaaacctgatgacacagccatctattactgtaagaccctccggtactggggccaggggacccaggtcaccgtctcctca

SEQ ID NO: 24 - DNA, 366 bp, synthetic construct
  source 1..366: mol_type = other DNA
gaggtgcagctggtggagtctgggggaggcttggcgcagcctggggggtctctgagactctcctgtgcagcctctggattcaccttcagtaactatgccatgagctgggcccgccaggctccaggaaaggggctcgagtgggtgtccggtatttatagtgatggtagtggcacatactatgcagactccgtgaagggccgattcaccatctccagagacaacgccaagaatacggtgtatctgcaaatgaacagcctgaaacctgaggacacggcactgtattactgtgcaaaagggaggaatagtggtagttactatccctgggatgactactggggccaggggacccaggtcaccgtctcctca

SEQ ID NO: 25 - DNA, 369 bp, synthetic construct
  source 1..369: mol_type = other DNA
gaggtgcagctggtggagtctgggggaggattggtgcaggctgggggctcgctgagcgtctcctgtgcagcctctggacgcaccttcagttggaatggtatgggctggttccgccaggctccaggagaggagcgtgagtttgtagcagctattagtcaaagtggtgggcgtacaaggtactcagactccgtgaagggccgattcaccatctccagagacaacgccaagaatatggtgtatctgcaaatgaacagcctgaaacctgaggacacggccgtttattactgtgcagcctcagatttcctgttagcgactactatatctgcatatgactactggggccaggggacccaggtcaccgtctcctca

SEQ ID NO: 26 - protein, 111 aa, synthetic construct
EVQLVESGGGLVQPGGSLRLSCAASGRKFSTLIMAWYRQAPGKQRELVATIERDGTTTYADSVKGRFTISRDNAKNTVYLQMNSLRPEDTAVYYCNALQYWGQGTQVTVSS

SEQ ID NO: 27 - protein, 111 aa, synthetic construct
EVQLVESGGGLVQPGGSLRLSCAASGRSFSTLIMAWYRQAPGKQRELVATIERDGTPTYADSVKGRFTISRDNAKNTVYLQMNSLRPEDTAVYYCNALRFWGQGTQVTVSS

SEQ ID NO: 28 - protein, 111 aa, synthetic construct
EVQLVESGGGLVQPGGSLRLSCAASGRRFSTLIMGWYRQAPGKQRELVATIERGGTPTYADSVKGRFTISRDNAKNTVYLQMNSLRPEDTAVYYCKTLRYWGQGTQVTVSS

SEQ ID NO: 29 - protein, 122 aa, synthetic construct
EVQLLESGGGLAQPGGSLRLSCAASGFTFSNYAMSWARQAPGKGLEWVSGIYSDGSGTYYADSVKGRFTISRDNAKNTVYLQMNSLRPEDTAVYYCAKGRNSGSYYPWDDYWGQGTQVTVSS

SEQ ID NO: 30 - protein, 123 aa, synthetic construct
EVQLLESGGGLVQPGGSLRVSCAASGRTFSWNGMGWFRQAPGKEREFVAAISQSGGRTRYADSVKGRFTISRDNAKNTVYLQMNSLRPEDTAVYYCAASDFLLATTISAYDYWGQGTQVTVSS

SEQ ID NO: 31 - protein, 5 aa, synthetic construct
  VARIANT 4: note = G, L, P, Q or W
NALXY

SEQ ID NO: 32 - protein, 8 aa, synthetic construct
  VARIANT 3: note = S or K
GRXFSTLI

SEQ ID NO: 33 - skipped

SEQ ID NO: 34 - protein, 5 aa, synthetic construct
  VARIANT 5: note = D, H, N or F
NALRX

SEQ ID NO: 35 - protein, 7 aa, synthetic construct
  VARIANT 2: note = D or E
  VARIANT 7: note = T or P
IXRDGTX

SEQ ID NO: 36 - protein, 5 aa, synthetic construct
  VARIANT 1: note = K, S or T
XTLRY

SEQ ID NO: 37 - protein, 8 aa, synthetic construct
  VARIANT 3: note = K, R or S
GRXFSTLI

SEQ ID NO: 38 - skipped

SEQ ID NO: 39 - protein, 15 aa, synthetic construct
  VARIANT 5: note = H or N
  VARIANT 14: note = D or E
AKGRXSGSYYPWDXY

SEQ ID NO: 40 - protein, 8 aa, synthetic construct
  VARIANT 6: note = N or S
GFTFSXYA

SEQ ID NO: 41 - protein, 16 aa, synthetic construct
  VARIANT 3: note = S or T
  VARIANT 4: note = D, N or Y
  VARIANT 7: note = I or L
  VARIANT 13: note = A or G
AAXXFLXATTISXYDY

SEQ ID NO: 42 - protein, 8 aa, synthetic construct
  VARIANT 6: note = S or W
  VARIANT 7: note = F, N or Y
GRTFSXXG

SEQ ID NO: 43 - protein, 111 aa, synthetic construct
EVQLVESGGGLVQAGGSLRLSCAASGRSFSTLIMAWYRQAPGKQRELVATVDRDGTATYADSVKGRFFISRDNAKNTVTLQMNNLKPEDTAMYYCNALLYWGQGTQVTVSS

SEQ ID NO: 44 - protein, 111 aa, synthetic construct
EVQLVESGGGLVQAGGSLRLSCAASGRSFSTLIMAWYRQAPGKQRELVATVDRDGTATYADSVKGRFFISRDNAKNTVTLQMNNLKPEDTAMYYCNALQYWGQGTQVTVSS

SEQ ID NO: 45 - protein, 111 aa, synthetic construct
EVQLVESGGGLVQAGGSLRLSCAASGRSFSTLIMAWYRQAPGKQRELVATIERDGTTTYADSVKGRFIISRDNAKNTVTLQMNNLKPDDTAIYYCNALGYWGQGTQVTVSS

SEQ ID NO: 46 - protein, 111 aa, synthetic construct
EVQLVESGGGLVQAGGSLRLSCAASGRSFSTLIMAWYRQAPGKQRELVATVDRDGTATYADSVKGRFFISRDNAKNTVTLQMNNLKPEDTAMYYCNALPYWGQGTQVTVSS

SEQ ID NO: 47 - protein, 111 aa, synthetic construct
EVQLVESGGGLVQAGESLRLSCAASGRSFSTLIMAWYRQAPGKQRELVATIERDGTTTYADTVKGRFFISRDNTKNTVTLQMNNLKPDDTAIYYCNALPYWGQGTQVTVSS

SEQ ID NO: 48 - protein, 111 aa, synthetic construct
EVQLVESGGGLVQAGGSLTLSCAASGRSFSTLIMAWYRQAPGKQRELVATIERDGTPTYADSVEARFFISRDNAKNTVTLQMNNLKPEDTAIYYCNALQYWGQGTQVTVSS

SEQ ID NO: 49 - protein, 111 aa, synthetic construct
EVQLVESGGGLVQAGGSLKLSCRVSGMPFDRISLGWYRQASGNQRELVARITALDDTFYTDSVKGRFTIDRDNAENTVYLQMNTLKPEDTAVYYCNALSYWGQGTQVTVSS

SEQ ID NO: 50 - protein, 111 aa, synthetic construct
EVQLVESGGGLVQAGGSLKLSCRVSGMPFDRISLGWYRERSGNQRELVARITMLDETFYIESVKGRFTIDRDNAENTVSLQMNTLKPEDTAVYYCNALSYWGQGTQVTVSS

SEQ ID NO: 51 - protein, 111 aa, synthetic construct
EVQLVESGGGLVQAGGSLRLSCAASGRSFSTLIMAWYRQAPGKQRELVATVDRDGTATYADSVKGRFFISRDNAKNTVTLQMNNLKPEDTAMYYCNALWYWGQGTQVTVSS

SEQ ID NO: 52 - protein, 111 aa, synthetic construct
EVQLVESGGGLVQAGGSLRLSCAASGRKFSTLIMAWYRQAPENQRELVATVDRDGTTTYADSVKGRFFISRDNAKNMVTLQMNNLKPEDTAIYYCNALHYWGQGTQVTVSS

SEQ ID NO: 53 - protein, 111 aa, synthetic construct
EVQLVESGGGLVQAGGSLRLSCAASGRSFSTLIMAWYRQAPGKQRELVATIDRDGTTMYADSVEGRFTISRDNAKNTVTLQMNDPKREDTAVYYCNALHYWGQGTQVTVSS

SEQ ID NO: 54 - protein, 111 aa, synthetic construct
EVQLVESGGGLVQAGGSLRLSCVASGRIFSSLIMTWYRQAPGKKREFVATIGTSGNTYYADSVEGRFTISRDDAKNTVSLQMDSLKPNDTAVYYCNTLLYWGRGAQVTVSS

SEQ ID NO: 55 - protein, 111 aa, synthetic construct
EVQLVESGGGLVQAGGSLRLSCAASGRSFSTLIMAWYRQAPGKQRELVATIERDGTPTYAESVEARFFISRDNAKNTVTLQMNNLKPEDTAIYYCNALGYWGQGTQVTVSS

SEQ ID NO: 56 - protein, 111 aa, synthetic construct
EVQLVESGGGLVQAGGSLRLSCAASGRSFSTLIMAWYRQAPGKQRELVATIERGGTPTYADSVEGRFFISRDNAKNTVTLQMNDLKPEDTATYYCNALGYWGQGTQVTVSS

SEQ ID NO: 57 - protein, 111 aa, synthetic construct
EVQLVESGGGLVQAGGSLRLSCAASGRSFSTLIMGWYRQAPGKQRELVATIERGGTTTYADSVEGRFFISRDNAKNTVTLQMNNLKPDDTAIYYCNALWYWGQGTQVTVSS

SEQ ID NO: 58 - protein, 111 aa, synthetic construct
EVQLVESGGGLVQAGGSLRLSCAASGRSFSTLIMAWYRQAPGKQRELVATIERDGTPTYTDSVKGRFFISRDNAKNTVTLHMNNLKPEDTAIYYCNALLYWGQGTQVTVSS

SEQ ID NO: 59 - protein, 111 aa, synthetic construct
EVQLVESGGGLVQAGGSLRLSCATSGRSFSTLIMAWYRQAPGKQRELVATINRDSTTDYADSVKGRFFISRDNAKNTVTLQMNNLKPEDTAIYYCNALGYWGQGTQVTVSS

SEQ ID NO: 60 - protein, 111 aa, synthetic construct
EVQLVESGGGLVQAGGSLRLSCAASGRSFSTLIMAWYRQAPGSQRELVATIERDGTTTYADSVKGRVFISRDNAKNTVTLQMNNLKPEDTAIYYCNALPYWGQGTQVTVSS

SEQ ID NO: 61 - protein, 111 aa, synthetic construct
EVQLVESGGGLVQAGESLRLSCAASGRSFSTLIMAWYRQAPGKQRELVATIERDGTTTYADTVKGRFFISRDNTKNTVTLQMNNLKPDDTAIYYCNALLYWGQGTQVTVSS

SEQ ID NO: 62 - protein, 111 aa, synthetic construct
EVQLVESGGGLVQAGGSLGLSCAASGRSFSTLIMAWYRQAPGKQRELVATIERGGTTTYADSVKGRFFASRDNAKNTVTLQMNNLKPDDTAIYYCNALGYWGQGTQVTVSS

SEQ ID NO: 63 - protein, 111 aa, synthetic construct
EVQLVESGGGLVQAGGSLRLSCAASGRRFSTLIMAWYRQAPGKQRELVATAERDGTTTYEDSVKGRFFISRDNAKNTVTLQMNNLKPEDTAIYYCNALLYWGQGTQVTVSS

SEQ ID NO: 64 - protein, 111 aa, synthetic construct
EVQLVESGGGLVQAGGSLRLSCAASGRSFSTLIMAWYRQAPGKQRELVATIERDGTPTYADSVKGRFFISRDNAKNTVTLQMNNLKPEDTAIYYCNALLYWGQGTQVTVSS

SEQ ID NO: 65 - protein, 111 aa, synthetic construct
EVQLVESGGGLVQAGGSLRLSCAASGRRFSTLIMAWYRQAPGKQRELVATAERDGTTTYEDSVKGRFFISRDNAKNTVTLQMNNLKPEDTAIYYCNALPYWGQGTQVTVSS

SEQ ID NO: 66 - protein, 111 aa, synthetic construct
EVQLVESGGGLVQAGGSLRLSCAASGRKFSTLIMAWYRQAPGKQRELVATIERDGTTTYADFVEGRFFISRDNAKNTVTLQMNNLEPEDSATYYCNALQYWGQGTQVTVSS

SEQ ID NO: 67 - protein, 111 aa, synthetic construct
EVQLVESGGGLVQAGGSLRLSCAASGRSFSTLIMAWYRQAPGKQRELVATIERDSTPTYADSVKGRFFISRDNAKNTVTLQMNNLKPEDTAIYYCNALWYWGQGTQVTVSS

SEQ ID NO: 68 - protein, 111 aa, synthetic construct
EVQLVESGGGLVQAGGSLRLSCAASGRSFSTLIMAWYRQAPGKQRELVATIERDGTTTYADSVKGRFIFSRDNAKNTVTLQMNNLKPEDTAIYYCNALPYWGQGTQVTVSS

SEQ ID NO: 69 - protein, 111 aa, synthetic construct
EVQLVESGGGLVQAGGSLRLSCAASGRSFSTLIMAWYRQAPGKQRELVATIDRDGTATYADSVEGRFFISRDNAKNTVTLQMNNLKPEDTAMYYCNALWYWGQGTQVTVSS

SEQ ID NO: 70 - protein, 111 aa, synthetic construct
EVQLVESGGGLVQAGGSLRLSCAASGRSFSTLIMAWYRQAPGKQRELVATIDRGGTTTYADSVEGRFFISRDNAKNTVTLQMNNLKPDDTALYYCNALLYWGQGTQVTVSS

SEQ ID NO: 71 - protein, 111 aa, synthetic construct
EVQLVESGGGLVQAGESLRLSCAASGRSFSTLIMAWYRQAPGKQRELVATIERDGTTTYADTVKGRFFISRDNTKNTVTLQMNNLKPDDTAIYYCNALQYWGQGTQVTVSS

SEQ ID NO: 72 - protein, 111 aa, synthetic construct
EVQLVESGGGLVQAGGSLRLSCAASGRSFSTLIMAWYRQAPGKQRELVATIDRGGTTTYADSVEGRFFISRDNAKNTVTLQMNNLKPDDTALYYCNALWYWGQGTQVTVSS

SEQ ID NO: 73 - protein, 111 aa, synthetic construct
EVQLVESGGGLVQAGGSLRLSCAASGRSFSTLIMGWYRQAPGKQRELVATIERGGTTTYADSVEGRFFISRDNAKNTVTLQMNNLKPDDTAIYYCNALLYWGQGTQVTVSS

SEQ ID NO: 74 - protein, 111 aa, synthetic construct
EVQLVESGGGLVQAGGSLRLSCAASGRSFSTLIMAWYRQAPGSQRELVATIERDGTTTYADSVKGRVFISRDNAKNTVTLQMNNLKPEDTAIYYCNALWYWGQGTQVTVSS

SEQ ID NO: 75 - protein, 111 aa, synthetic construct
EVQLVESGGGLVQAGGSLRLSCAASGRSFSTLIMAWYRQAPRKQRELVATIERDGTPTYADSVKGRFFISRDNANNTVTLQMDNLKPEDTAIYYCNALRFWGQGTQVTVSS

SEQ ID NO: 76 - protein, 111 aa, synthetic construct
EVQLVESGGGLVQAGGSLRLSCAASGRSFSTLIMAWYRQAPGKQRELVATVDRDGTATYADSVKGRFFISRDNAKNTVTLQMNNLKPEDTAMYYCNALRNWGQGTQVTVSS

SEQ ID NO: 77 - protein, 111 aa, synthetic construct
EVQLVESGGGLVQAGGSLRLSCAASGRKFSTLIMAWYRQAPGKQRELVATVDRGGTTTYSDSVKGRFFISRDNAKNTTTLQMNNLKPDDTAIYYCNALRNWGQGTQVTVSS

SEQ ID NO: 78 - protein, 111 aa, synthetic construct
EVQLVESGGGLVQAGGSLRLSCAASGRSFSTLIMGWYRQAPGKQRELVATINRDGTTTYADSVKGRFFISRDNAKNTVTLQMNNLKPDDTAIYYCNALRFWGQGTQVTVSS

SEQ ID NO: 79 - protein, 111 aa, synthetic construct
EVQLVESGGGLVQPGGSLRLSCAASGRSFSTLIMAWYRQAPGEQRELVATIERDGTPTYTDSVKGRFFISRDNAKNTVTLQMNNLKPEDTAIYYCNALRLWGQGTQVTVSS

SEQ ID NO: 80 - protein, 111 aa, synthetic construct
EVQLVESGGGLVQAGGSLRLSCAASGRSFSTLIMAWYRQAPGKQRELVATVDRDGTATYADSVKGRFFISRDNAKNTVTLQMNNLKPEDTAMYYCNALRDWGQGTQVTVSS

SEQ ID NO: 81 - protein, 111 aa, synthetic construct
EVQLVESGGGLVQAGGSLRLSCAASGRSFSTLIMGWYRQAPGKQRELVATIERGGTTTYADSVEGRFFISRDNAKNTVTLQMNNLKPDDTAIYYCNALRDWGQGTQVTVSS

SEQ ID NO: 82 - protein, 111 aa, synthetic construct
EVQLVESGGGLVQAGGSLRLSCAASGRSFSTLIMAWYRQAPGKQRELVATVDRDGTATYADSVKGRFFISRDNAKNTVTLQMNNLKPEDTAMYYCNALRHWGQGTQVTVSS

SEQ ID NO: 83 - protein, 111 aa, synthetic construct
EVQLVESGGGLVQAGGSLTLSCAAAGRKFSTLIMAWYRQAPGKQRELVATIERDGTTSYEDSVKGRFFISRDNAKNTVTLQMNNLKPEDTAIYYCNALRFWGQGTQVTVSS

SEQ ID NO: 84 - protein, 111 aa, synthetic construct
EVQLVESGGGLVQAGGSLRLSCAASGRSFSTLIMAWYRQAPGKQRELVATIERDGTTTYADSVKGRFFFSRDNAKNTVTLQMNNLKPEDTAIYYCNALRSWGQGTQVTVSS

SEQ ID NO: 85 - protein, 111 aa, synthetic construct
EVQLVESGGGLVQAGESLRLSCAASGRSFSTLIMAWYRQAPGKQRELVATIERDGTTTYADTVKGRFFISRDNTKNTVTLQMNNLKPDDTAIYYCNALRHWGQGTQVTVSS

SEQ ID NO: 86 - protein, 111 aa, synthetic construct
EVQLVESGGGLVQAGESLRLSCAASGRSFSTLIMAWYRQAPGKQRELVATIERDGTTTYADTVKGRFFISRDNTKNTVTLQMNNLKPDDTAIYYCNALRNWGQGTQVTVSS

SEQ ID NO: 87 - protein, 111 aa, synthetic construct
EVQLVESGGGLVQAGGSLRLSCAASGRSFSTLIMAWYRQAPGKQRELVATIERGGTATYTDSVKGRFFISRDNAKNTVTLHMNNLKPEDTAIYYCNALRDWGQGTQVTVSS

SEQ ID NO: 88 - protein, 111 aa, synthetic construct
EVQLVESGGGLVQAGGSLTLSCAAAGRKFSTLIMAWYRQAPGKQRELVATIERDGTTSYEDSVKGRFFISRDNAKNTVTLQMNNLKPEDTAIYYCNALRLWGQGTQVTVSS

SEQ ID NO: 89 - protein, 111 aa, synthetic construct
EVQLVESGGGLVQAGGSLRLSCAASGRTFSTLIMAWYRQAPGKQRELVATIERGGTTTYADSVKGRFSISRDNAKNTVTLQMNNLKPDDTAIYYCNALRNWGQGTQVTVSS

SEQ ID NO: 90 - protein, 111 aa, synthetic construct
EVQLVESGGGLVQAGGSLRLSCAASGRSFSTLIMAWYRQAPGKQRELVATIERDGTTTYTDSVEGRFFISRDNAKNTVTLHMNNLKPEDTAIYYCNALRSWGQGTQVTVSS

SEQ ID NO: 91 - protein, 111 aa, synthetic construct
EVQLVESGGGLVQPGGSLRLSCAASGRSFSTLIMAWYRQAPGEQRELVATIERDGTPTYTDSVKGRFFISRDNAKNTVTLQMNNLKPEDTAIYYCNALRSWGQGTQVTVSS

SEQ ID NO: 92 - protein, 111 aa, synthetic construct
EVQLVESGGSLVQAGGSLRLSCAASGRSFSTLIMAWYRQAPGKQRELVATIDRDGTTTYVDSVKGRFTISRDNAKNTVTLQMNNLKPEDTAVYYCNALRRWGQGTQVTVSS

SEQ ID NO: 93 - protein, 111 aa, synthetic construct
EVQLVESGGGLVQAGGSLRLSCAASGRKFSTLIMAWYRQAPGKQRELVATIERDGTTTYADSVEGRFFISRDNAKNTVTLQMNNLEPEDSATYYCNALRHWGQGTQVTVSS

SEQ ID NO: 94 - protein, 111 aa, synthetic construct
EVQLVESGGGLVQAGESLRLSCAASGRSFSTLIMAWYRQAPGKQRELVATIERDGTTTYADTVKGRFFISRDNTKNTVTLQMNNLKPDDTAIYYCNALRDWGQGTQVTVSS

SEQ ID NO: 95 - protein, 111 aa, synthetic construct
EVQLVESGGGLVQAGGSLRLSCAASGRSFSTLIMAWYRQAPGSQRELVATIERDGTTTYADSVKGRVFISRDNAKNTVTLQMNNLKPEDTAIYYCNALRHWGQGTQVTVSS

SEQ ID NO: 96 - protein, 111 aa, synthetic construct
EVQLVESGGGLVQAGGSLRLSCAASGRSFSTLIMAWYRQAPGKQRELVATIERDGTTTCADSVKGRFFISRDNAKNTVTLQMNNLKPDDTAIYYCNALRCWGQGTQVTVSS

SEQ ID NO: 97 - protein, 111 aa, synthetic construct
EVQLVESGGGLVQAGGSLRLSCAASGRSFSTLIMGWYRQAPGKQRELVATIERDGTTTYADFVKGRFIISRDNAKNTVTLQMNNLKPDDTAIYYCNALRNWGQGTQVTVSS

SEQ ID NO: 98 - protein, 111 aa, synthetic construct
EVQLVESGGGLVQAGGSLRLSCAASGRSFSTLIMAWYRQAPGKQRDLVATIERDGTTTYADSVKGRFFISRDNAKNTVTLQMNNLKPEDTAIYYCNALRSWGQGTQVTVSS

SEQ ID NO: 99 - protein, 111 aa, synthetic construct
EVQLVESGGGLVQAGGSLRLSCAASGRSFSTLIMAWYRQAPGKQRERVATIERDGTTTYEDSVKGRFTISRDNAKNTVTLQMNNLKPEDTAVYYCNALRDWGQGTQVTVSS

SEQ ID NO: 100 - protein, 111 aa, synthetic construct
EVQLVESGGGLVQAGGSLRLSCAASGRSFSTLIMAWYRQAPGKQRELVATIDRDGTTTYVDSVKGRFTISRDNAKNTVTLQMNNLKPEDTAVYYCNALRHWGQGTQVTVSS

SEQ ID NO: 101 - protein, 111 aa, synthetic construct
EVQLVESGGGLVQAGGSLRLSCAASGRKFSTLIMGWYRQAPGKQRELVATIERDDTTTYADSVKGRFFISRDNAKNTVTLQMNNLKPEDTAIYYCKTLRYWGQGTQVTVSS

SEQ ID NO: 102 - protein, 111 aa, synthetic construct
EVQLVESGGGLVQAGGSLRLSCAASGRKFSTLIMGWYRQAPGKQRELVATIERDDTTTYADSVKGRFFISRDNAKNTVTLQMNNLKPEDTAIYYCTTLRYWGQGTQVTVSS

SEQ ID NO: 103 - protein, 111 aa, synthetic construct
EVQLVESGGGLVQAGGSLRLSCAASGRKFSTLIMAWYRQAEGKQRELVATIDRDGTTTYADSVKGRFTISRDNAKNTVTLQMNNLKPEDTAVYYCKTLRYWGQGTQVTVSS

SEQ ID NO: 104 - protein, 111 aa, synthetic construct
EVQLVESGGGLVQAGGSLRLSCAVSGRSFSTLIMAWYRQAPGKQRELVATIDRGGTTTVTDSVKGRFFISRDNAKNTVTLQMNNLKPEDTATYYCKTLRYWGQGTQVTVSS

SEQ ID NO: 105 - protein, 111 aa, synthetic construct
EVQLVESGGGLVQAGGSLRLSCAASGRKFSTLIMAWYRQAEGKQRELVATIDRDGTTTYADSVKGRFTISRDNAKNTVTLQMNNLKPEDTAVYYCSTLRYWGQGTQVTVSS

SEQ ID NO: 106 - protein, 122 aa, synthetic construct
EVQLVESGGGLAQPGGSLRLSCAASGFTFSSYAMSWVRQGPGKGLEWVSGIYSDGSGTYYADSVKGRFTISRDNAKNTVYLQMNSLKPEDTALYYCAKGRHSGSYYPWDEYWGQGTQVTVSS

SEQ ID NO: 107 - protein, 122 aa, synthetic construct
EVQLVESGGGLARPGGSLRLSCAASGFTFSSYAMSWVRQGPGKGLEWVSGIYSDGSGTYYADSVKGRFTISRDNAKNTVYLQMNSLKPEDTALYYCAKGRLSGSYYPWDEYWGQGTQVTVSS

SEQ ID NO: 108 - protein, 122 aa, synthetic construct
EVQLVESGGGLAQPGGSLRLSCAASGFTFSYYAMSWVRQAPGKGLEWVSGIYSDGSGTYYADSVKGRFTISRDNAKNTVYLQMNSLKPEDTALYYCAKGRHSGSYYPWDDYWGQGTQVTVSS

SEQ ID NO: 109 - protein, 122 aa, synthetic construct
EVQLVESGGGLAQPGGSLRLSCAASGFTFSNYAMSWVRQAPGKGLEWVSGIYSDGSGTYYADSVKGRFTISRDNAKNTVYLQMNSLKPEDTALYYCAKGRNSGSYYPWDDYWGQGTQVTVSS

SEQ ID NO: 110 - protein, 122 aa, synthetic construct
EVQLVESGGGLAQPGGSLRLSCAASGFTFSNYAMSWARQAPGKGLEWVSGIYSDGSGTYYADSVKGRFTISRDNAKNTVYLQMNSLKPEDTALYYCAKGRGSGSYYPWDDHWGQGTQVTVSS

SEQ ID NO: 111 - protein, 122 aa, synthetic construct
EVQLVESGGGLAQPGGSLRLSCAASGFTFSNYAMSWVRQAPGKGLEWVSGIYSDGSGTYYADSVKGRFTISRDNAKNTVYLQMNSLKPEDTALYYCAKGRNSGSYFPWDDYWGQGTQVTVSS

SEQ ID NO: 112 - protein, 122 aa, synthetic construct
EVQLVESGGGLAQPGGSLRLSCAASGFTFSNYAMSWVRQAPGKGLEWVSGIYSDGSGTYYADSVKGRFTISRDNAKNTVYLQMNSLKPEDTALYYCAKGRHSGSYYPWDEYWGQGTQVTVSS

SEQ ID NO: 113 - protein, 122 aa, synthetic construct
EVQLVESGGGLAQPGGSLRLSCAASGFTFSNYAMSWARQAPGKGLEWVSGIYSDGSGTYYADSVKGRFTISRDNAKNTVYLQMNSLKPEDTALYYCAKGRGSGSYDPWDDYWGQGTQVTVSS

SEQ ID NO: 114 - protein, 122 aa, synthetic construct
EVQLVESGGGLAQPGGSLRLSCAASGFTFSNYAMSWARQAPGKGLEWVSGIYSDGSGTYYADSVKGRFTISRDNAKNTVYLQMNSLKPEDTALYYCAKGRNSGSYYPWDEYWGQGTQVTVSS

SEQ ID NO: 115 - protein, 122 aa, synthetic construct
EVQLVESGGGLAQPGGSLRLSCAASGFTFSNYAMSWARQAPGKGLEWVSGIYSDGSGTYYADSVKGRFTISRDNAKNTVYLQMNSLKPEDTALYYCAKGRNSGSYDPWDDYWGQGTQVTVSS

SEQ ID NO: 116 - protein, 122 aa, synthetic construct
EVQLVESGGGLAQPGGSLRLSCAASGFTFSSYAMSWVRQGPGKGLEWVSGIYSDGSGTYYADSVKGRFTISRDNAKNTVYLQMNSLKPEDTALYYCAKGRHSGSYDPWDEYWGQGTQVTVSS

SEQ ID NO: 117 - protein, 122 aa, synthetic construct
EVQLVESGGGLAQPGGSLRLSCAASGFTFSNYAMSWVRQAPGKGLEWVSGIYSDGSDTYYADSVKGRFTISRDNAKNTVYLQMNSLKPEDTALYYCAKGRNSGSYYPWDVYWGQGTQVTVSS

SEQ ID NO: 118 - protein, 122 aa, synthetic construct
EVQLVESGGGLAQPGGSLRLSCAASGFTFSNYAMSWARQAPGKGLEWVSGIYSDGSGTYYADSVKGRFTISRDNAKNTVYLQMNSLKPEDTALYYCAKGRHSGSYYPWDDYWGQGTQVTVSS

SEQ ID NO: 119 - protein, 122 aa, synthetic construct
EVQLVESGGGLAQPGGSLRLSCAASGFTFSNYAMSWARQAPGKGLEWVSGIYSDGSGTYYADSVKGRFTISRDNAKNTVYLQMNSLKPEDTALYYCAKGRNSGSFYPWDDYWGQGTQVTVSS

SEQ ID NO: 120 - protein, 122 aa, synthetic construct
EVQLVESGGGLAQPGGSLRLSCAASGFTFSNYAMSWARQAPGKGLEWVSGIYSDGSGTYYADSVKGRFTISRDNAKNTVYLQMNSLKPEDTALYYCAKGRNSGSYYAWDDYWGQGTQVTVSS

SEQ ID NO: 121 - protein, 122 aa, synthetic construct
EVQLVESGGGLAQPGGSLRLSCAASGFTFSSYAMSWVRQGPGKGLEWVSGIYSDGSGTYYADSVKGRFTISRDNAKNTVYLQMNSLKPEDTALYYCTKGRHSGSYYPWDEYWGQGTQVTVSS

SEQ ID NO: 122 - protein, 122 aa, synthetic construct
EVQLVESGGGLAQPGGSLRLSCAASGFTFSNYAMSWVRQAPGKGLEWVSGIYSDGSGTYYADSVKGRFTISRDNAKNTVYLQMNSLKPEDTALYYCAKGRHSGSYYPRDEYWGQGTQVTVSS

SEQ ID NO: 123 - protein, 122 aa, synthetic construct
EVQLVESGGGLAQPGGSLRLSCAASGFTFSSYAMSWVRQGPGKGLEWVSGIYSDGSGTYYADSVKGRFTISRDNAKNTVYLQMNSLKPEDTALYYCAKGRHRGSYYPWDEYWGQGTQVTVSS

SEQ ID NO: 124 - protein, 122 aa, synthetic construct
EVQLVESGGGLAQPGGSLRLSCAASGFTFSNYAMSWARQAPGKGLEWVSGIYSDGSGTYYADSVKGRFTISRDNAKNTVYLQMNSLKPEDTALYYCAKGRNSGSDYPWDDYWGQGTQVTVSS

SEQ ID NO: 125 - protein, 122 aa, synthetic construct
EVQLVESGGGLAQPGGSLRLSCAASGFTFSNYAMSWVRQAPGKGLEWVSGIYSDGSGTYYADSVKGRFTISRDNAKNTVYLQMNSLKPEDTALYYCAKGRHSGSYYPWDEHWGQGTQVTVSS

SEQ ID NO: 126 - protein, 122 aa, synthetic construct
EVQLVESGGGLAQPGGSLRLSCAASGFTFSSYAMSWVRQGPGKGLEWVSGIYSDGSGTYYADSVKGRFTISRDNAKNTVYLQMNSLKPEDTALYYCAKGRHSGSYYPWDEHWGQGTQVTVSS

SEQ ID NO: 127 - protein, 122 aa, synthetic construct
EVQLVESGGGLAQPGGSLRLSCAASGFTFSNYAMSWARQAPGKGLEWVSGIYSDGSGTYYADSVKGRFTISRDNAKNTVYLQMNSLKPEDTALYYCATGRGSGSYYPWDDYWGQGTQVTVSS

SEQ ID NO: 128 - protein, 122 aa, synthetic construct
EVQLVESGGGLAQPGGSLRLSCAASGFTFSNYAMSWARQAPGKGLEWVSGIYSDGSGTYYADSVKGRFTISRDNAKNTVYLQMNSLKPEDTALYYCAKGRNSGSYYPWGDYWGQGTQVTVSS

SEQ ID NO: 129 - protein, 122 aa, synthetic construct
EVQLVESGGGLAQPGGSLRLSCAASGFTFSNYAMSWARQAPGKGLEWVSGIYSDGSGTYYADSVKGRFTISRDNAKNTVYLQMNSLKPEDTALYYCAKGRNSGGYYPWDDYWGQGTQVTVSS

SEQ ID NO: 130 - protein, 122 aa, synthetic construct
EVQLVESGGGLAQPGGSLRLSCAASGFTFSNYAMSWARQAPGKGLEWVSGIYGDGSGTYYADSVKGRFTISRDNAKNTVYLQMNSLKPEDTALYYCATGRGSGSYYPWDDYWGQGTQVTVSS

SEQ ID NO: 131 - protein, 122 aa, synthetic construct
EVQLVESGGGLAQPGGSLRLSCAASGFTFSNYAMSWVRQAPGKGLEWVSGIYSDGSGTYYADSVKGRFTISRDNAKNTVYLQMNSLKPEDTALYYCANGRHSGSYYPWDEYWGQGTQVTVSS

SEQ ID NO: 132 - protein, 122 aa, synthetic construct
EVQLVESGGGLAQPGGSLRLSCAASGFTFSNYAMSWVRQAPGKGLEWVSGIYSDGSGTYYADSVKGRFTISRDNAKNTVYLQMNSLKPEDTALYYCAKGSHSGSYYPWDEYWGQGTQVTVSS

SEQ ID NO: 133 - protein, 122 aa, synthetic construct
EVQLVESGGGLAQPGGSLRLSCAASGFTFSNYAMSWVRQAPGKGLEWVSGIYSDGSGTYYADSVKGRFTISRDNAKNTVYLQMNSLKPEDTALYYCAKGRHGGSYYPWDEYWGQGTQVTVSS

SEQ ID NO: 134 - protein, 122 aa, synthetic construct
EVQLVESGGGLAQPGGSLRLSCAASGFTFSSYAMSWVRQGPGKGLEWVSGIYSDGSGTYYADSVKGRFTISRDNAKNTVYLQMNSLKPEDTALYYCSKGRHSGSYYPWDEYWGQGTQVTVSS

SEQ ID NO: 135 - protein, 122 aa, synthetic construct
EVQLVESGGGLAQPGGSLRLSCAASGFTFSNYAMSWVRQAPGKGLEWVSGIYSDGSGTYYADSVKGRFTISRDNAKNTVYLQMNSLKPEDTALYYCAKGRNSGGYYPWDDYWGQGTQVTVSS

SEQ ID NO: 136 - protein, 122 aa, synthetic construct
EVQLVESGGGLAQPGGSLRLSCAASGFTFSSYAMSWVRQGPGKGLEWVSGIYSDGSGTYYADSVKGRFTISRDNAKNTVYLQMNSLKPEDTALYYCAKGRLSGSYYPWDEYWGQGTQVTVSS

SEQ ID NO: 137 - protein, 122 aa, synthetic construct
EVQLVESGGGLAQPGGSLRLSCAASGFTFSNYAMSWARQAPGKGLEWVSGIYSDGSGTYYADSVKGRFTISRDNAKNTVYLQMNSLKPEDTALYYCAKGRNSGSYYTWDDYWGQGTQVTVSS

SEQ ID NO: 138 - protein, 122 aa, synthetic construct
EVQLVESGGGLAQPGGSLRLSCAASGFTFSNYAMSWVRQAPGKGLEWVSGIYSDGSGTYYADSVKGRFTISRDNAKNTVYLQMNSLKPEDTALYYCSKGRHSGSYYPWDEYWGQGTQVTVSS

SEQ ID NO: 139 - protein, 122 aa, synthetic construct
EVQLVESGGGLAQPGGSLRLSCAASGFTFSSYAMSWVRQGPGKGLEWVSGIYSDGSGTYYADSVKGRFTISRDNAKNTVYLQMNSLKPEDTALYYCAKGRHSGSDYPWDEYWGQGTQVTVSS

SEQ ID NO: 140 - protein, 122 aa, synthetic construct
EVQLVESGGGLAQPGGSLRLSCAASGFTFSNYAMSWARQAPGKGLEWVSGIYSDGSGTYYADSVKGRFTISRDNAKNTVYLQMNSLKPEDTALYYCAKGRNSGSYYPWYDYWGQGTQVTVSS

SEQ ID NO: 141 - protein, 122 aa, synthetic construct
EVQLVESGGGLAQPGGSLRLSCAASGFTFSNYAMSWARQAPGKGLEWVSGIYGDGSGTYYADSVKGRFTISRDNAKNTVYLQMNSLKPEDTALYYCAKGRGSGSYYPWDNYWGQGTQVTVSS

SEQ ID NO: 142 - protein, 122 aa, synthetic construct
EVQLVESGGGLAQPGGSLRLSCAASGFTFSNYAMSWVRQAPGKGLEWVSGIYSDGSGTYYADSVKGRFTISRDNAKNTVYLQMNSLKPEDTALYYCAKGRHSGSYYPWEEYWGQGTQVTVSS

SEQ ID NO: 143 - protein, 122 aa, synthetic construct
EVQLVESGGGLAQPGGSLRLSCAASGFTFSSYAMSWVRQGPGKGLEWVSGIYSDGSGTYYADSVKGRFTISRDNAKNTVYLQMNSLKPEDTALYYCANGRHSGSYYPWDEYWGQGTQVTVSS

SEQ ID NO: 144 - protein, 122 aa, synthetic construct
EVQLVESGGGLAQPGGSLRLSCAASGFTFSNYAMSWVRQAPGKGLEWVSGIYSDGSGTYYADSVKGRFTISRDNAKNTVYLQMNSLKPEDTALYYCAKGRHSGSYDPWDEYWGQGTQVTVSS

SEQ ID NO: 145 - protein, 122 aa, synthetic construct
EVQLVESGGGLAQPGGSLRLSCAASGFTFSSYAMSWVRQGPGKGLEWVSGIYSDGSGTYYADSVKGRFTISRDNAKNTVYLQMNSLKPEDTALYYCAKGSHSGSYYPWDEYWGQGTQVTVSS

SEQ ID NO: 146 - protein, 122 aa, synthetic construct
EVQLVESGGGLAQPGGSLRLSCAASGFTFSNYAMSWARQAPGKGLEWVSGIYSDGSGTYYADSVKGRFTISRDNAKNTVYLQMNSLKPEDTALYYCAKGRNSVSYYPWDDYWGQGTQVTVSS

SEQ ID NO: 147 - protein, 122 aa, synthetic construct
EVQLVESGGGLAQPGGSLRLSCAASGFTFSNYAMSWVRQAPGKGLEWVSGIYSDGSGTYSADSVKGRFTISRDNAKNTVYLQMNSLKPDDTALYYCAKGKHSGSYYPWDEYWGQGTQVTVSS

SEQ ID NO: 148 - protein, 122 aa, synthetic construct
EVQLVESGGGLAQPGGSLRLSCAASGFTFSNYAMSWARQAPGKGLEWVSGIYSDGSGTYYADSVKGRFTISRDNAKNTVYLQMNSLKPEDTALYYCAKGRNRGSYYPWDDYWGQGTQVTVSS

SEQ ID NO: 149 - protein, 122 aa, synthetic construct
EVQLVESGGGLAQPGGSLRLSCAASGFTFSNYAMSWARQAPGKGLEWVSGIYSDGSGTYYADSVKGRFTISRDNAKNTVYLQMNSLKPEDTALYYCAKGRNSGSYYHWDDYWGQGTQVTVSS

SEQ ID NO: 150 - protein, 122 aa, synthetic construct
EVQLVESGGGLAQPGGSLRLSCAASGFTFSSYAMSWVRQGPGKGLEWVSGIYSDGSGTYYADSVKGRFTISRDNAKNTVYLQMNSLKPEDTALYYCATGRHSGSYYPWDEYWGQGTQVTVSS

SEQ ID NO: 151 - protein, 122 aa, synthetic construct
EVQLVESGGGLAQPGGSLRLSCAASGFTFSSYAMSWVRQGPGKGLEWVSGIYSDGSGTYYADSVKGRFTISRDNAKNTVYLQMNSLKPEDTALYYCAKGRHSGSYYPWEEYWGQGTQVTVSS

SEQ ID NO: 152 - protein, 122 aa, synthetic construct
EVQLVESGGGLAQPGGSLRLSCAASGFTFSNYAMSWARQAPGKGLEWVSGIYSDGSGTYYADSVKGRFTISRDNAKNTVYLQMNSLKPEDTALYYCAKGRNSGSYYPWDGYWGQGTQVTVSS

SEQ ID NO: 153 - protein, 122 aa, synthetic construct
EVQLVESGGGLAQPGGSLRLSCAASGFTFSNYAMSWVRQAPGKGLEWVSGIYSDGSGTYYADSVKGRFTISRDNAKNTVYLQMNSLKPEDTALYYCAKGRHSGSDYPWDEYWGQGTQVTVSS

SEQ ID NO: 154 - protein, 122 aa, synthetic construct
EVQLVESGGGLAQPGGSLRLSCAASGFTFSNYAMSWARQAPGKGLEWVSGIYSDGSGTYYADSVKGRFTISRDNAKNTVYLQMNSLKPEDTALYYCAKGRGSGSYYPWDGYWGQGTQVTVSS

SEQ ID NO: 155 - protein, 122 aa, synthetic construct
EVQLVESGGGLAQPGGSLRLSCAASGFTFSNYAMSWARQAPGKGLEWVSGIYSDGSGTYYADSVKGRFTISRDNAKNTVYLQMNSLKPEDTALYYCAKVRNSGSYYPWDDYWGQGTQVTVSS

SEQ ID NO: 156 - protein, 122 aa, synthetic construct
EVQLVESGGGLAQPGGSLRLSCAASGFTFSNYAMSWVRQAPGKGLEWVSGIYSDGSGTYYADSVKGRFTISRDNAKNTVYLQMNSLKPEDTALYYCAKVRNSGSYYPWDDYWGQGTQVTVSS

SEQ ID NO: 157 - protein, 122 aa, synthetic construct
EVQLVESGGGLAQPGGSLRLSCAASGFTFSNYAMSWARQAPGKGLEWVSGIYSDGSGTYYADSVKGRFTISRDNAKNTVYLQMNSLKPEDTALYYCAKGRGSGSYYPWEDYWGQGTQVTVSS

SEQ ID NO: 158 - protein, 122 aa, synthetic construct
EVQLVESGGGLAQPGGSLRLSCAASGFTFSNYAMSWARQAPGKGLEWVSGIYSDGSGTYYADSVKGRFTISRDNAKNTVYLQMNSLKPEDTALYYCAKGRNSGSYYPWEDYWGQGTQVTVSS

SEQ ID NO: 159 - protein, 122 aa, synthetic construct
EVQLVESGGGLAQPGGSLRLSCAASGFTFSNYAMSWARQAPGKGLEWVSGIYSDGSGTYYADSVKGRFTISRDNAKNTVYLQMNSLKPEDTALYYCAKGRHSGSYYPWDEYWGQGTQVTVSS

SEQ ID NO: 160 - protein, 122 aa, synthetic construct
EVQLVESGGGLVQPGGSLRLSCAASGFTFSSYAMSWVRQGPGKGLEWVSGIYSDGSGTYYADSVKGRFTISRDNAKNTVYLQMNSLKPEDTALYYCAKGRLSGSYYPWDEYWGQGTQVTVSS

SEQ ID NO: 161 - protein, 122 aa, synthetic construct
EVQLVESGGGLAQPGGSLRLSCAASGFTFSNYAMSWARQAPGKGLEWVSGIYSDGSGTYYADSVKGRFTISRDNAKNTVYLQMNSLKPEDTALYYCAKGRHSGSYDPWDEYWGQGTQVTVSS

SEQ ID NO: 162 - protein, 122 aa, synthetic construct
EVQLVESGGGLAQPGGSLRLSCAASGFTFSNYAMSWARQAPGKGLEWVSGIYSDGSGTYYADSVKGRFTISRDNAKNTVYLQMNSLKPEDTALYYCAKGWGSGSYYPWDDYWGQGTQVTVSS

SEQ ID NO: 163 - protein, 122 aa, synthetic construct
EVQLVESGGGLAQPGGSLRLSCAASGFTFSSYAMSWVRQGPGKGLEWVSGIYSDGSGTYYADSVKGRFTISRDNAKNTVYLQMNSLKPEDTALYYCAKVRHSGSYYPWDEYWGQGTQVTVSS

SEQ ID NO: 164 - protein, 122 aa, synthetic construct
EVQLVESGGGLAQPGGSLRLSCAASGFTFSSYAMSWVRQGPGKGLEWVSGIYSDGSGTYYADSVKGRFTISRDNAKNTVYLQMNSLKPEDTALYYCAKGRHSGSYYPRDEYWGQGTQVTVSS

SEQ ID NO: 165 - protein, 122 aa, synthetic construct
EVQLVESGGGLAQPGGSLRLSCAASGFTFSSYAMSWVRQGPGKGLEWVSGIYSDGSGTYYADSVKGRFTISRDNAKNTVYLQMNSLKPEDTALYYCAKGRHSGRYYPWDEYWGQGTQVTVSS

SEQ ID NO: 166 - protein, 122 aa, synthetic construct
EVQLVESGGGLAQPGGSLRLSCAASGFTFSNYAMSWARQAPGKGLEWVSGIYSDGSGTYYADSVKGRFTISRDNAKNTVYLQMNSLKPEDTALYYCAKGRNSGSHYPWDDYWGQGTQVTVSS

SEQ ID NO: 167 - protein, 122 aa, synthetic construct
EVQLVESGGGLAQPGGSLRLSCAASGFTFSNYAMSWARQAPGKGLEWVSGIYSDGSGTYYADSVKGRFTISRDNAKNTVYLQMNSLKPEDTALYYCAKGRGSGSYHPWDDYWGQGTQVTVSS

SEQ ID NO: 168 - protein, 122 aa, synthetic construct
EVQLVESGGGLAQPGGSLRLSCAASGFTFSNYAMSWARQAPGKGLEWVSGIYSDGSGTYYADSVKGRFTISRDNAKNTVYLQMNSLKPEDTALYYCAKGSGSGSYYPWDDYWGQGTQVTVSS

SEQ ID NO: 169 - protein, 122 aa, synthetic construct
EVQLVESGGGLAQPGGSLRLSCAASGFTFSNYAMSWARQAPGKGLEWVSGIYGDGSGTYYADSVKGRFTISRDNAKNTVYLQMDSLKPEDTALYYCAKGRGSGGYYPWDDYWGQGTQVTVSS

SEQ ID NO: 170 - protein, 122 aa, synthetic construct
EVQLVESGGGLAQPGGSLRLSCAASGFTFSNYAMSWVRQAPGKGLEWVSGIYSDGSGTYYADSVKGRFTISRDNAKNTVYLQMNSLKPEDTALYYCAKGRHSVSYYPWDEYWGQGTQVTVSS

SEQ ID NO: 171 - protein, 122 aa, synthetic construct
EVQLVESGGGLAQPGGSLRLSCAASGFTFSNYAMSWVRQAPGKGLEWVSGIYSDGSGTYYADSVKGRFTISRDNAKNTVYLQMNSLKPEDTALYYCAKGRLSGSYYPWDEYWGQGTQVTVSS

SEQ ID NO: 172 - protein, 122 aa, synthetic construct
EVQLVESGGGLAQPGGSLRLSCAASGFTFSNYAMSWARQAPGKGLEWVSGIYSDGSGTYYADSVKGRFTISRDNAKNTVYLQMNSLKPEDTALYYCAKGRNSGSYFPWDDYWGQGTQVTVSS

SEQ ID NO: 173 - protein, 122 aa, synthetic construct
EVQLVESGGGLAQPGGSLRLSCAASGFTFSNYAMSWARQAPGKGLEWVSGIYSDGSGTYYADSVKGRFTISRDNAKNTVYLQMNSLKPEDTALYYCAKGRNSGRYYPWDDYWGQGTQVTVSS

SEQ ID NO: 174 - protein, 122 aa, synthetic construct
EVQLVESGGGLAQPGGSLRLSCAASGFTFSNYAMSWARQAPGKGLEWVSGIYGDGSGTYYADSVKGRFTISRDNAKNTVYLQMNSLKPEDTALYYCAKGRGSGSYDPWDDYWGQGTQVTVSS

SEQ ID NO: 175 - protein, 122 aa, synthetic construct
EVQLVESGGGLAQPGGSLRLSCAASGFTFSSYAMSWVRQGPGKGLEWVSGIYSDGSGTYYADSVKGRFTISRDNAKNTVYLQMNSLKPEDTALYYCAKGRHSGSYYPWYEYWGQGTQVTVSS

SEQ ID NO: 176 - protein, 122 aa, synthetic construct
EVQLVESGGGLAQPGGSLRLSCAASGFTFSNYAMSWARQAPGKGLEWVSGIYSDGSGTYYADSVKGRFTISRDNAKNTVYLQMNSLKPEDTALYYCAKGRGSGSYYPWDAYWGQGTQVTVSS

SEQ ID NO: 177 - protein, 122 aa, synthetic construct
EVQLVESGGGLAQPGGSLRLSCAASGFTFSYYAMSWVRQAPGKGLEWVSGIYSDGSGTYYADSVKGRFTISRDNAKNTVYLQMNSLKPEDTALYYCAKGRHSGSSYPWDDYWGQGTQVTVSS

SEQ ID NO: 178 - protein, 122 aa, synthetic construct
EVQLVESGGGLAQPGGSLRLSCAASGFTFSNYAMSWARQAPGKGLEWVSGIYSDGSGTYYADSVKGRFTISRDNAKNTVYLQMNSLKPEDTALYYCAKGRHSGSYYPLDDYWGQGTQVTVSS

SEQ ID NO: 179 - protein, 122 aa, synthetic construct
EVQLVESGGGLAQPGGSLRLSCAASGFTFSYYAMSWVRQAPGKGLEWVSGIYSDGSGTYYADSVKGRFTISRDNAKNTVYLQMNSLKPEDTALYYCAKGRHSGSYYPRDDYWGQGTQVTVSS

SEQ ID NO: 180 - protein, 122 aa, synthetic construct
EVQLVESGGGLAQPGGSLRLSCAASGFTFSNYAMSWARQAPGKGLEWVSGIYSDGSGTYYADSVKGRFTISRDNAKNTVYLQMNSLKPEDTALYYCAKGRHSGSYDPWDDYWGQGTQVTVSS

SEQ ID NO: 181 - protein, 122 aa, synthetic construct
EVQLVESGGGLAQPGGSLRLSCAASGFTFSYYAMSWVRQAPGKGLEWVSGIYSDGSGTYYADSVKGRFTISRDNAKNTVYLQMNSLKPEDTALYYCANGRHSGSYYPWDDYWGQGTQVTVSS

SEQ ID NO: 182 - protein, 122 aa, synthetic construct
EVQLVESGGGLAQPGGSLRLSCAASGFTFSNYAMSWARQAPGKGLEWVSGIYSDGSGTYYADSVKGRFTISRDNAKNTVYLQMNSLKPEDTALYYCAKGRHSGSYYPWEDYWGQGTQVTVSS

SEQ ID NO: 183 - protein, 122 aa, synthetic construct
EVQLVESGGGLAQPGGSLRLSCAASGFTFSYYAMSWVRQAPGKGLEWVSGIYSDGSGTYYADSVKGRFTISRDNAKNTVYLQMNSLKPEDTALYYCAKGRHSGSYYPWYDYWGQGTQVTVSS

SEQ ID NO: 184 - protein, 122 aa, synthetic construct
EVQLVESGGGLVQPGGSLRLSCAASGFTFSNYAMSWVRQAPGKGLEWVSGIYSDGSGTYSADSVKGRFTISRDNAKNTVYLQMNSLKPDDTALYYCAKGKHSGSYYPWDDYWGQGTQVTVSS

SEQ ID NO: 185 - protein, 122 aa, synthetic construct
EVQLVESGGGLAQPGGSLRLSCAASGFTFSNYAMSWARQAPGKGLEWVSGIYSDGSGTYYADSVKGRFTISRDNAKNTVYLQMNSLKPEDTALYYCAKGRHSGSYYPWDDHWGQGTQVTVSS

SEQ ID NO: 186 - protein, 122 aa, synthetic construct
EVQLVESGGGLAQPGGSLRLSCAASGFTFSNYAMSWARQAPGKGLEWVSGIYSDGSGTYYADSVKGRFTISRDNAKNTVYLQMNSLKPEDTALYYCAKGRHSGSYYPRDDYWGQGTQVTVSS

SEQ ID NO: 187 - protein, 122 aa, synthetic construct
EVQLVESGGGLAQPGGSLRLSCAASGFTFSNYAMSWVRQAPGKGLEWVSGIYSDGSGTYSADSVKGRFTISRDNAKNTVYLQMNSLKPDDTALYYCAKGKHSGSYYPWDDYWGQGTQVTVSS

SEQ ID NO: 188 - protein, 122 aa, synthetic construct
EVQLVESGGGLAQPGGSLRLSCATSGFTFSNYAMSWVRQAPGKGLEWVSGIYSDGSGTYSADSVKGRFTISRDNAKNTVYLQMNSLKPDDTALYYCAKGKHSGSYYPWDDYWGQGTQVTVSS

SEQ ID NO: 189 - protein, 122 aa, synthetic construct
EVQLVESGGGLAQPGGSLRLSCAASGFTFSYYAMSWVRQAPGKGLEWVSGIYSDGSGTYYADSVKGRFTISRDNAKNTVYLQMNSLKPEDTALYYCAKGRHSGSYYPWDDHWGQGTQVTVSS

SEQ ID NO: 190 - protein, 122 aa, synthetic construct
EVQLVESGGGLAQPGGSLRLSCAASGFTFSYYAMSWVRQAPGKGLEWVSGIYSDGSGTYYADSVKGRFTISRDNAKNTVYLQMNSLKPEDTALYYCAKVRHSGSYYPWDDYWGQGTQVTVSS

SEQ ID NO: 191 - protein, 122 aa, synthetic construct
EVQLVESGGGLAQPGGSLRLSCAASGFTFSYYAMSWVRQAPGKGLEWVSGIYSDGSGTYYADSVKGRFTISRDNAKNTVYLQMNSLKPEDTALYYCAKGRHSGSYYHWDDYWGQGTQVTVSS

SEQ ID NO: 192 - protein, 122 aa, synthetic construct
EVQLVESGGGLAQPGGSLRLSCAASGFTFSNYAMSWARQAPGKGLEWVSGIYSDGSGTYYADSVKGRFTISRDNAKNTVYLQMNSLKPEDTALYYCANGRHSGSYYPWDDYWGQGTQVTVSS

SEQ ID NO: 193 - protein, 122 aa, synthetic construct
EVQLVESGGGLAQPGGSLRLSCAASGFTFSYYAMSWVRQAPGKGLEWVSGIYSDGSGTYYADSVKGRFTISRDNAKNTVYLQMNSLKPEDTALYYCAKGRHSGSYDPWDDYWGQGTQVTVSS

SEQ ID NO: 194 - protein, 122 aa, synthetic construct
EVQLVESGGGLAQPGGSLRLSCAASGFTFSYYAMSWVRQAPGKGLEWVSGIYSDGSGTYYADSVKGRFTISRDNAKNTVYLQMNSLKPEDTALYYCAKGRHSGSDYPWDDYWGQGTQVTVSS

SEQ ID NO: 195 - protein, 122 aa, synthetic construct
EVQLVESGGGLAQPGGSLRLSCAASGFTFSNYAMSWARQAPGKGLEWVSGIYSDGSGTYYADSVKGRFTISRDNAKNTVYLQMNSLKPEDTALYYCAKGRNNGSYYPWDDYRGQGTQVTVSS

SEQ ID NO: 196 - protein, 122 aa, synthetic construct
EVQLVESGGGLAQPGGSLRLSCAASGFTFSSYAMSWVRQGPGKGLEWVSGIYSDGSGTYYADSVKGRFTISRDNAKNTVYLQMNSLKPEDTALYYCAKGRHSGSYYPWEEYWGRGTQVTVSS

SEQ ID NO: 197 - protein, 122 aa, synthetic construct
EVQLVESGGGLVQPGGSLRLSCAASGFTFSNYAMSWARQAPGKGLEWVSGIYSDGSGTYYADSVKGRFTISRDNAKNTVYLQMNSLKPEDTALYYCAKGRGSGSYYPWDGYWGQGTQVTVSS

SEQ ID NO: 198 - protein, 122 aa, synthetic construct
EVQLVESGGGLAQPGGSLRLSCAASGFTFSSYAMSWVRQGPGKGLEWVSGIYSDGSGTYYADSVKGRFTISRDNAKNTVYLQMNSLKPEDTALYYCAKGRHSGSYYPLDEYWGQGTQVTVSS

SEQ ID NO: 199 - protein, 122 aa, synthetic construct
EVQLVESGGGLAQPGGSLRLSCAASGFTFSNYAMSWARQAPGKGLEWVSGIYSDGSGTYYADSVKGRFTISRDNAKNTVYLQMNSLKPEDTALYYCAKGRGSGSYFPWDDYWGQGTQVTVSS

SEQ ID NO: 200 - protein, 122 aa, synthetic construct
EVQLVESGGGLAQPGGSLRLSCAASGFTFSSYAMSWVRQGPGKGLEWVSGIYSDGSGTYYADSVKGRFTISRDNAKNTVYLQMNSLKPEDTALYYCAKGRHSGSYYHWDEYWGQGTQVTVSS

SEQ ID NO: 201 - protein, 122 aa, synthetic construct
EVQLVESGGGLAQPGGSLRLSCAASGFTFSSYAMSWVRQGPGKGLEWVSGIYSDGSGTYYADSVKGRFTISRDNAKNTVYLQMNSLKPEDTALYYCAKGRHSGSYYPWDESWGQGTQVTVSS

SEQ ID NO: 202 - protein, 122 aa, synthetic construct
EVQLVESGGGLAQPGGSLRLSCAASGFTFSNYAMSWVRQAPGKGLEWVSGIYSDGSGTYYADSVKGRFTISRDNAKNTVYLQMNSLKPEDTALYYCAKGRHSGSYYHWDEYWGQGTQVTVSS

SEQ ID NO: 203 - protein, 122 aa, synthetic construct
EVQLVESGGGLAQPGGSLRLSCAASGFTFSSYAMSWVRQGPGKGLEWVSGIYSDGSGTYYADSVKGRFTISRDNAKNTVYLQMNSLKPEDTALYYCAKGMHSGSYYPWDEYWGQGTQVTVSS

SEQ ID NO: 204 - protein, 122 aa, synthetic construct
EVQLVESGGGLAQPGGSLRLSCAASGFTFSNYAMSWVRQAPGKGLEWVSGIYSDGSGTYYADSVKGRFTISRDNAKNTVYLQMNSLKPEDTALYYCAKGRHRGSYYPWDEYWGQGTQVTVSS

SEQ ID NO: 205 - protein, 122 aa, synthetic construct
EVQLVESGGGLAQPGGSLRLSCAASGFTFSNYAMSWARQAPGKGLEWVSGIYSDGSGTYYADSVKGRFTISRDNAKNTVYLQMNSLKPEDTALYYCAKGRNIGSYYPWDDYWGQGTQVTVSS

SEQ ID NO: 206 - protein, 122 aa, synthetic construct
EVQLVESGGGLAQPGGSLRLSCAASGFTFSNYAMSWVRQAPGKGLEWVSGIYSDGSGTYYADSVKGRFTISRDNAKNTVYLQMNSLKPEDTALYYCAKGRNSVSYYPWDDYWGQGTQVTVSS

SEQ ID NO: 207 - protein, 122 aa, synthetic construct
EVQLVESGGGLAQPGGSLRLSCAASGFTFSNYAMSWVRQAPGKGLEWVSGIYSDGSGTYYADSVKGRFTISRDNAKNTVYLQMNSLKPEDTALYYCAKWRHSGSYYPWDEYWGQGTQVTVSS

SEQ ID NO: 208 - protein, 122 aa, synthetic construct
EVQLVESGGGLAQPGGSLRLSCAASGFTFSNYAMSWVRQAPGKGLEWVSGIYSDGSGTYYADSVKGRFTISRDNAKNTVYLQMNSLKPEDTALYYCAKGRHSGSYYPWDESWGQGTQVTVSS

SEQ ID NO: 209 - protein, 122 aa, synthetic construct
EVQLVESGGGLAQPGGSLRLSCAASGFTFSNYAMSWVRQAPGKGLEWVSGIYSDGSGTYYADSVKGRFTISRDNAKNTVYLQMNSLKPEDTALYYCAKGRHSGRYYPWDEYWGQGTQVTVSS

SEQ ID NO: 210 - protein, 122 aa, synthetic construct
EVQLVESGGGLAQPGGSLRLSCAASGFTFSSYAMSWVRQGPGKGLEWVSGIYSDGSGTYYADSVKGRFTISRDNAKNTVYLQMNSLKPEDTALYYCAKGRHSGSYYPGDEYWGQGTQVTVSS

SEQ ID NO: 211 - protein, 122 aa, synthetic construct
EVQLVESGGGLAQPGGSLRLSCAASGFTFSNYAMSWVRQAPGKGLEWVSGIYSDGSGTYYADSVKGRFTISRDNAKNTVYLQMNSLKPEDTALYYCAKGRHSGSSYPWDEYWGQGTQVTVSS

SEQ ID NO: 212 - protein, 122 aa, synthetic construct
EVQLVESGGGLAQPGGSLRLSCAASGFTFSSYAMSWVRQGPGKGLEWVSGIYSDGSGTYYADSVKGRFTISRDNAKNTVYLQMNSLKPEDTALYYCAKWRHSGSYYPWDEYWGQGTQVTVSS

SEQ ID NO: 213 - protein, 122 aa, synthetic construct
EVQLVESGGGLAQPGGSLRLSCAASGFTFSNYAMSWARQAPGKGLEWVSGIYSDGSGTYYADSVKGRFTISRDNAKNTVYLQMNSLKPEDTALYYCAKGRNSGSSYPWDDYWGQGTQVTVSS

SEQ ID NO: 214 - protein, 122 aa, synthetic construct
EVQLVESGGGLAQPGGSLRLSCAASGFTFSSYAMSWVRQGPGKGLEWVSGIYSDGSGTYYADSVKGRFTISRDNAKNTVYLQMNSLKPEDTALYYCAKGRHSGSSYPWDEYWGQGTQVTVSS

SEQ ID NO: 215 - protein, 122 aa, synthetic construct
EVQLVESGGGLAQPGGSLRLSCAASGFTFSNYAMSWVRQAPGKGLEWVSGIYSDGSGTYYADSVKGRFTISRDNAKNTVYLQMNSLKPEDTALYYCAKGRNRGSYYPWDDYWGQGTQVTVSS

SEQ ID NO: 216 - protein, 122 aa, synthetic construct
EVQLVESGGGLAQPGGSLRLSCAASGFTFSNYAMSWVRQAPGKGLEWVSGIYSDGSGTYYADSVKGRFTISRDNAKNTVYLQMNSLKPEDTALYYCAKGRHSGGYYPWDEYWGQGTQVTVSS

SEQ ID NO: 217 - protein, 122 aa, synthetic construct
EVQLVESGGGLAQPGGSLRLSCAASGFTFSNYAMSWARQAPGKGLEWVSGIYSDGSGTYYADSVKGRFTISRDNAKNTVYLQMNSLKPEDTALYYCAKGRGSGSYYPWGDYWGQGTQVTVSS

SEQ ID NO: 218 - protein, 123 aa, synthetic construct
EVQLVESGGGLVQAGGSLRLSCAASGRTFSSYGMGWFRQAPGEEREFVAAISQSGGRTRYSDSVKGRFTISRDNAKNMVYLQMNSLKPEDTAVYYCAATNFLIATTISAYDYWGQGTQVTVSS

SEQ ID NO: 219 - protein, 123 aa, synthetic construct
EVQLVESGGGLVQAGGSLSVSCAASGRTFSWYGMGWFRQAPGEEREFVAAISQSGGRTRYSDSVKGRFTISRDNAKNMVYLQMNSLKPEDTAVYYCAASNFLIATTISAYDYWGQGTQVTVSS

SEQ ID NO: 220 - protein, 123 aa, synthetic construct
EVQLVESGGGLVQAGGSLSVSCAASGRTLSGYGMGWFRQAPGEEREFVAAISQSGGRTRYSDSVKGRFTISRDNAKNMVYLQMNSLKPEDTAIYYCAASNFLLATTNSAYDYWGQGTQVTVSS

SEQ ID NO: 221 - protein, 123 aa, synthetic construct
EVQLVESGGGLVQAGGSLRLSCAASGRTFASFGMGWFRQAIGKEREFVAAISRGGGRTRYSDSVKGRFTISRDDAKNMVYLQMNSLKPEDTAVYYCAASYFLLATTISGYDYWGQGTQVTVSS

SEQ ID NO: 222 - protein, 123 aa, synthetic construct
EVQLVESGGGLVQAGGSLRLSCAASGRTFASFGMGWFRQAIGKEREFVAAISRSGGRTRYSDSVKGRFTISRDDAKNRVYLQMNSLKPEDTAVYYCAASYFLLATTISGYDFWGQGTQVTVSS

SEQ ID NO: 223 - protein, 123 aa, synthetic construct
EVQLVESGGGLVQAGGSLRLSCAASGRTFSSYGMGWFRQAPGKEREFVVAISGSGGRTRFSDSVKGRFTISRDNAKNMVYLQMNSLKPEDTAVYYCAASDFLIATSISAYDYWGQGTQVTVSS

SEQ ID NO: 224 - protein, 123 aa, synthetic construct
EVQLVESGGGLVQAGGSLRLSCAASGRTFASFGMGWFRQPIGEEREFVAAISQGGGRTRYSDSVKGRFTISRDDANNMVYLQMNSLKPEDTAVYYCAASYFLLATTISGYDYWGQGTQVTVSS

SEQ ID NO: 225 - protein, 123 aa, synthetic construct
EVQLVESGGGLVQAGGSLRLSCAASGRTFSSYGMGWFRQAPGKEREFVVAVSGGGGRTRFSDSVKGRFTISRDNAKNMVYLQMNSLKPEDTAVYYCAASDFLIATSISAYDYWGQGTQVTVSS

SEQ ID NO: 226 - protein, 123 aa, synthetic construct
EVQLVESGGGLVQAGGSLSVSCAASGRTFSWYGMGWFRQAPGEEREFVAAISRSGGRTRYSDSVKGRFTISRDNAKNMVYLQMNSLKPEDTAVYYCAASNFLIATTISAYDYWGQGTQVTVSS

SEQ ID NO: 227 - protein, 123 aa, synthetic construct
EVQLVESGGGLVQAGGSLSVSCAASGRTFSWYGMGWFRQAPGEERVFVAAISHSGGRTRYSDSVKGRFTISRDNAKNMVYLQMNSLKPEDTAVYYCAASNFLIATTISAYDYWGQGTQVTVSS

SEQ ID NO: 228 - protein, 123 aa, synthetic construct
EVQLVESGGGLVQAGGSLRLSCAASGRTFSSYGMGWFRQAPGEEREFVAAISQSGGRTRYSDSVKGRFTISRDNAKNMVYLQMNSLKPEDTAVYYCAATNFLRATTISAYDYWGQGTQVTVSS

SEQ ID NO: 229 - protein, 123 aa, synthetic construct
EVQLVESGGGLVQAGGSLRLSCAASGRTFSSYGMGWFRQAPGEEREFVAAISQSGGRTRYSDSVKGRFTISRDNAKNMVYLQMNSLKPEDTAVYYCAATNFLMATTISAYDYWGQGTQVTVSS

SEQ ID NO: 230 - protein, 123 aa, synthetic construct
EVQLVESGGGLVQAGGSLRLSCAASGRTFADFGMGWFRQAIGKEREFVAAISRSGGRTRYSDSVKGRFTISRDDAKNMVYLQMNSLKPEDTAVYYCAASYFLLAITISGYDYWGQGTQVTVSS

SEQ ID NO: 231 - protein, 123 aa, synthetic construct
EVQLVESGGGLVQAGGSLSVSCAASGRTFSWNGMGWFRQAPGEEREFVAAISQSGGRPRYSDSVKGRFTISRDNAKNMVYLQMNSLKPEDTAVYYCAASDFLLATTISAYDYWGQGTQVTVSS

SEQ ID NO: 232 - protein, 123 aa, synthetic construct
EVQLVESGGGLVQAGGSLRLSCAASGRTFSSYGMGWFRQAPGEEREFVAAISQSGGRTRYSDSVKGRFTISRDNAKNMVYLQMNSLKPEDTAVYYCAATNFLIATTISAYDHWGQGTQVTVSS

SEQ ID NO: 233 - protein, 123 aa, synthetic construct
EVQLVESGGGLVQAGGSLRLSCAASGRTFASFGMGWFRQAIGKEREFVAGISQSGGRTRYSDSVKGRFTISRDDAKNMVYLQMNSLKPEDTAVYYCAASYFLIANTISGYDYWGQGTQVTVSS

SEQ ID NO: 234 - protein, 123 aa, synthetic construct
EVQLVESGGGLVQAGGSLRLSCAASGRTFSSYGMGWFRQAPGEEREFVAAISQSGGRTRYSDSVKGRFTISRDNAKNMVYLQMNSLKPEDTAVYYCAATNFLIAATISAYDYWGQGTQVTVSS

SEQ ID NO: 235 - protein, 123 aa, synthetic construct
EVQLVESGGGLAQAGGSLRLSCAASGRTFSSYGMGWFRQAPGEEREFVAAISQSGGRTRYSDSVKGRFTISRDNAKNMVYLQMNSLKPEDTAVYYCAATNFLIATTISAYGYWGQGTQVTVSS

SEQ ID NO: 236 - protein, 123 aa, synthetic construct
EVQLVESGGGLVQAGGSLRLSCAASGRTFSSYGMGWFRQAPGEEREFVAAISQSGGRTRYSDSVKGRFTISRDNAKNMVYLQMNSLKPEDTAVYYCAATNFLIATTMSAYDYWGQGTQVTVSS

SEQ ID NO: 237 - protein, 123 aa, synthetic construct
EVQLVESGGGLVQAGGSLRLSCAASGRTFSSYGVGWFRQAPGEEREFVAAISQSGGRTRYSDSVKGRFTISRDNAKNMVYLQMNSLKPEDTAVYYCAATNFLIAATISAYDYWGQGTQVTVSS

SEQ ID NO: 238 - protein, 123 aa, synthetic construct
EVQLVESGGGLVQAGGSLRLSCAASGRTFSSYGMGWFRQAPGEEREFVAAISQSGGRTRYSDSVKGRFTISRDNAKNMVYLQMNSLKPEDTAVYYCAATNLLIATTISAYDYWGQGTQVTVSS

SEQ ID NO: 239 - protein, 123 aa, synthetic construct
EVQLVESGGGLVQAGGSLRLSCAASGRTFSSYGMGWFRQAPGEEREFVAAISQSGGRTRYSDSVKGRFTISRDNAKNMVYLQMNSLKPEDTAVYYCADTNFLIATTISAYDYWGQGTQVTVSS

SEQ ID NO: 240 - protein, 123 aa, synthetic construct
EVQLVESGGGLVQAGGSLRLSCAASGRTFSSYGMGWFRQAPGEEREFVAAISQSGGRTRYSDSVKGRFTISRDNAKNMVYLQMNSLKPEDTAVYYCAATNSLIATTISAYDYWGQGTQVTVSS

SEQ ID NO: 241 - protein, 123 aa, synthetic construct
EVQLVESGGGLVQAGGSLSVSCAASGRTLSGYGMGWFRQAPGEEREFVAAISQSGGRTRYSDSVKGRFTISRDNAKNMVYLQMNSLKPEDTAIYYCAASIFLLATTNSAYDYWGQGTQVTVSS

SEQ ID NO: 242 - protein, 123 aa, synthetic construct
EVQLVESGGGLVQAGGSLRLSCAASGRTFSSYGMGWFRQAPGEEREFVAAISQSGGRTRYSDSVKGRFTISRDNAKNMVYLQMNSLKPEDTAVYYCAATNFLIATTISAYDSWGQGTQVTVSS

SEQ ID NO: 243 - protein, 123 aa, synthetic construct
EVQLVESGGGLVQAGGSLRLSCAASGRTFSSYGMGWFRQAPGEEREFVAAISQSGGRTRYSDSVKGRFTISRDNAKNMVYLQMNSLKPEDTAVYYCAATNFLIAITISAYDYWGQGTQVTVSS

SEQ ID NO: 244 - protein, 123 aa, synthetic construct
EVQLVESGGGLVQAGGSLRLSCAASGRTFSSYGMGWFRQAPGEEREFVAAISQSGGRTRYSDSVKGRFTISRDNAKNMVYLQMNSLKPEDTAVYYCAATKFLIATTISAYDYWGQGTQVTVSS

SEQ ID NO: 245 - protein, 123 aa, synthetic construct
EVQLVESGGGLVQAGGSLRLSCAASGRTFSSYGMGWFRQAPGEEREFVAAISQSGGRTRYSDSVKGRFTISRDNAKNMVYLQMNSLKPEDTAVYYCTATNFLIATTISAYDYWGQGTQVTVSS

SEQ ID NO: 246 - protein, 123 aa, synthetic construct
EVQLVESGGGLVQAGGSLRLSCAASGRTFSSYGMGWFRQAPGEEREFVAAISQSGGRTRYSDSVKGRFTISRDNVKNMVYLQMNSLKPEDTAVYYCAATNFLIATTISAHDYWGQGTQVTVSS

SEQ ID NO: 247 - protein, 123 aa, synthetic construct
EVQLVESGGGLVQAGGSLRLSCAASGRTFSSYGMGWFRQAPGEEREFVAAISQSGGRTRYSDSVKGRFTISRDNAKNMVYLQMNSLKPEDTAVYYCAATNVLIATTISAYDYWGQGTQVTVSS

SEQ ID NO: 248 - protein, 123 aa, synthetic construct
EVQLVESGGGLVQAGGSLRLSCAASGRTFASFGMGWFRQAIGKEREFVAGISQSGGRTRYSDSVKGRFTISRDDAKNIVYLQMNSLKPEDTAVYYCAASYFLIANTISGYDYWGQGTQVTVSS

SEQ ID NO: 249 - protein, 123 aa, synthetic construct
EVQLVESGGGLVQAGGSLRLSCAASGRTFSSYGMGWFRQAPGEEREFVAAISQSGGRTRYSDSVKGRFTISRDNAKNMVYLQMNSLKPEDTAVYHCAATNFPIATTISAYDYWGQGTQVTVSS

SEQ ID NO: 250 - protein, 123 aa, synthetic construct
EVQLVESGGGLVQAGGSLRLSCAASGRTFSSYGMGWFRQAPGEEREFVAAISQSGGRTRYSDSVKGRFTISRDNAKNMVYLQMNSLKPEDTAVYYCAATNFLIATAISAYDYWGQGTQVTVSS

SEQ ID NO: 251 - protein, 123 aa, synthetic construct
EVQLVESGGGLVQAGGSLSVSCAASGRTFSWNGMGWFRQAPGEEREFVAAISQGGGRTRYSDSVKGRFTISRDNAKNMVYLQMNSLKPEDTAVYYCAASDFLLATTISAYDYWGQGTQVTVSS

SEQ ID NO: 252 - protein, 123 aa, synthetic construct
EVQLVESGGGLVQAGGSLRLSCAASGRTFSSYGMGWFRQAPGKEREFVVAISGGGGRTRFSDSVKGRFTISRDNAKNMVYLQMNSLKPEDTAVYYCAASDFLIATTISAYDYWGQGTQVTVSS

SEQ ID NO: 253 - protein, 123 aa, synthetic construct
EVQLVESGGGLVQAGGSLRLSCAASGRTFSSYGMGWFRQAPGEEREFVAAISQSGGRTRYSDSVKGRFTISRDNAKNMVYLQMNSLKPEDTAVYYCAATNFLIATTISAYDDWGQGTQVTVSS

SEQ ID NO: 254 - protein, 123 aa, synthetic construct
EVQLVESGGGLVQAGGSLRLSCAASGRTFSSYGMGWFRQAPGEEREFVAAISQSGGRTRYSDSVKGRFTISRDNAKNMVYLQMNSLKPEDTAVYYCAATNFLLATTISAYDYWGQGTQVTVSS

SEQ ID NO: 255 - protein, 123 aa, synthetic construct
EVQLVESGGGLVQAGGSLRLSCAASGRTFSSYGMGWFRQAPGEEREFVAAISQSGGRTRYSDPVKGRFTISRDNAKNMVYLQMNSLKPEDTAVYYCAATNFLIATTMSAYDYWGQGTQVTVSS

SEQ ID NO: 256 - protein, 123 aa, synthetic construct
EVQLVESGGGLVQAGGSLRLSCAASGRTFSSYGMGWFRQAPGKEREFVVAISGGGGRTRFSDSVKGRFTISRDNAKSMVYLQMNSLKPEDTAVYYCAASDFLIATTLSAYDYWGQGTQVTVSS

SEQ ID NO: 257 - protein, 123 aa, synthetic construct
EVQLVESGGGLVQAGGSLRLSCAASGRTFSSYGMGWFRQAPGEEREFVAAISQSGGRTRYSDSVKGRFTISRDNAKNMVYLQMNSLKPEDTAVYYCAATNFLIATTISAYDFWGQGTQVTVSS

SEQ ID NO: 258 - protein, 123 aa, synthetic construct
EVQLVESGGGLVQAGGSLSVSCAASGRTLSGYGMGWFRQAPGEEREFVAAISQSGGRTRYSDSVKGRFTISRDNAKYMVYLQMNSLKPEDTAIYYCAASNFLLATTNSAYDYWGQGTQVTVSS

SEQ ID NO: 259 - protein, 123 aa, synthetic construct
EVQLVESGGGLVQAGGSLRLSCAASGRTFSSYGMGWFRQAPGEEREFVAAISQSGGRTRYSDSVKGRFTISRDNAKNMVYLQMNSLKPEDTAVYYCAATNFRIATTISAYDYWGQGTQVTVSS

SEQ ID NO: 260 - protein, 123 aa, synthetic construct
EVQLVESGGGLVQAGGSLRLSCAASGRTFSSYGMGWFRQAPGEEREFVAAISQSGGRTRYSDSVKGRFTISRDNAKNMVYLQMNSLKPEDTAVYYCAVTNFLIATTISAYDYWGQGTQVTVSS

SEQ ID NO: 261 - protein, 123 aa, synthetic construct
EVQLVESGGGLVQAGGSLRLSCAASGRTFSNYGMGWFRQAPGKEREFVVAISSSGGRTRFSDSVKGRFTISRDNAKNMVYLQMNNLKPEDTAVYYCAASDFPIAATISAYDYWGQGTQVTVSS

SEQ ID NO: 262 - protein, 123 aa, synthetic construct
EVQLVESGGGLVQAGGSLRLSCAASGRTFSSYGMGWFRQAPGEEREFVAAISQSGGRTRYSDSVKGRFTISRDNAKNMVYLQMNSLKPEDTAVYYCAATNFLIATTISTYDYWGQGTQVTVSS

SEQ ID NO: 263 - protein, 123 aa, synthetic construct
EVQLVESGGGLVQAGGSLRPSCAASGRTFSSYGMGWFRQAPGEEREFVAAISQSGGRTRYSDSVKGRFTISRDNAKNMVYLQMNSLKPEDTAVYYCAATNFPIATTISAYDYWGQGTQVTVSS

SEQ ID NO: 264 - protein, 123 aa, synthetic construct
EVQLVESGGGLVQAGGSLRLSCAASGRTFSSYGMGWFRQAPGEEREFVAAISQSGGRTRYSDSVKGRFTISRDNAKNMVYLQMNSLKPEDTAVYYCAATNFLIATTIFAYDYWGQGTQVTVSS

SEQ ID NO: 265 - protein, 123 aa, synthetic construct
EVQLLESGGGLVQAGGSLSVSCAASGRTLSGYGMGWFRQAPGEEREFVAAISQSGGRTRYSDSVKGRFTISRDNAKNMVYLQMNSLKPEDTAIYYCAASNFLLATTNSAYDYWGQGTQVTVSS

SEQ ID NO: 266 - protein, 123 aa, synthetic construct
EVQLVESGGGLVQAGGSLSVSCAASGRTFSWNGMGWFRQAPGEEREFVAAISQSGGRTRYSDSVKGRFTISRDNTKNMVYLQMNSLKPEDTAVYYCAASDFLLATTTSAYDYWGQGTQVTVSS

SEQ ID NO: 267 - protein, 123 aa, synthetic construct
EVQLVESGGGLVQAGGSLSVSCAASEHTLSGYGMGWFRQAPGEEREFVAAISQSGGRTRYSDSVKGRFTISRDNAKNMVYLQMNSLKPEDTAIYYCAASIFLLATTNSAYDYWGQGTQVTVSS

SEQ ID NO: 268 - protein, 123 aa, synthetic construct
EVQLVESGGGLVQAGGSLRLSCAASGRTFSSYGMGWFRQAPGEEREFVAAISQSGGRTRYSDSVKGRFTISRDNAKNMVYLQMNSLKPEDTAVYYCAATIFLIATTISAYDYWGQGTQVTVSS

SEQ ID NO: 269 - protein, 123 aa, synthetic construct
EVQLVESGGGLVQAGGSLRLSCAASGRTFSSYGMGWFRQAPGEEREFVAAISQSGGRTRYSDSVKGRFTISRDNAKNMVYLQMNSLKPEDTAVYYCAASNFLIATTISAYDYWGQGTQVTVSS

SEQ ID NO: 270 - protein, 123 aa, synthetic construct
EVQLVESGGGLVQAGGSLRLSCAASGRTFSSYGMGWFRQAPGEEREFVAAISQSGGRTRYSDSVKGRFTISRDNAKNMVYLQMNSLKPEDTAVYYCAATNFLIETTISAYDYWGQGTQVTVSS

SEQ ID NO: 271 - protein, 123 aa, synthetic construct
EVQLVESGGGLVQAGGSLRLSCAASGRTFSSYGMGWFRQAPGEEREFVAAISQSGGRTRYSDSVKGRFTISRDNAKNMVYLQMNSLKPEDTAVYYCAATNFLIATTISAYAYWGQGTQVTVSS

SEQ ID NO: 272 - protein, 123 aa, synthetic construct
EVQLVESGGGLVQAGGSLRLSCAASGRTFSSYGMGWFRQAPGEEREFVAAISQSGGRTRYSDSVKGRFTISRDNAKNMVYLQMNSLKPEDTAVYYCAATYFLIATTISAYDYWGQGTQVTVSS

SEQ ID NO: 273 - protein, 123 aa, synthetic construct
EVQLVESGGGLVQAGGSLRLSCAASGRTFSSYGMGWFRQAPGEEREFVAAISQSGGRTRYSDSVKGRFTISRDNAKNMVYLQMNSLKPEDTAVYYCAATNFLIATTISAFDYWGQGTQVTVSS

SEQ ID NO: 274 - protein, 123 aa, synthetic construct
EVQLVESGGGLVQAGGSLRLSCAASGRTFSSYGMGWFRQAPGEEREFVAAISQSGGRTRYSDSVKGRFTISRDNAKNMVYLQMNSLKPEDTAVYYCAATNFLIATSISAYDYWGQGTQVTVSS

SEQ ID NO: 275 - protein, 123 aa, synthetic construct
EVQLVESGGGLVQAGGSLRLSCAASGRTFASFGMGWFRQAIGKEREFVAGISQSGGRTRYSDSVKGRFTISRDDAKNMVYLQMNSLKPEDTAAYYCAASYFLIANTISGYDYWGQGTQVTVSS

SEQ ID NO: 276 - protein, 123 aa, synthetic construct
EVQLVESGGGLVQAGGSLRLSCAASGRTFSSYGMGWFRQAPGKEREFVVAISGSGGRTRFSDSVKGRFTISRDNAENMVYLQMNSLKPEDTAVYYCAATDFLIATTISAYDYWGQGTQVTVSS

SEQ ID NO: 277 - protein, 123 aa, synthetic construct
EVQLVESGGGLVQAGGSLRLSCAASGRTFSSYGMGWFRQAPGKEREFVVAISGGGGRTRFSDSVKGRFTISRDNAKNMVYLQMNSLKPEDTAVYYCAGSDFLMATTISAYDYWGQGTQVTVSS

SEQ ID NO: 278 - protein, 123 aa, synthetic construct
EVQLVESGGGLVQAGGSLSVSCAASGRTFSWYGMGWFRQAPGEGRVFVAAISHSGGRTRYSDSVKGRFTISRDNAKNMVYLQMNSLKPEDTAVYYCAASDFLIATTVSAYDYWGQGTQVTVSS

SEQ ID NO: 279 - protein, 123 aa, synthetic construct
EVQLVESGGGLVQAGGSLRLSCAASGRTFSSYGMGWFRQAPGKEREFVVAISGGGGRTRFSDSVKGRFTISRDNAKNMVYLQMNSLKPEDTAVYYCAASDFLIATTVSAYDYWGQGTQVTVSS

SEQ ID NO: 280 - protein, 123 aa, synthetic construct
EVQLVESGGGLVQAGGSLRLSCAASGRTFSSYGMGWFRQAPGEEREFVAAISQSGGRTRYSDSVKGRFTISRDNAKNMVYLQMNSLKPEDTAVYYCAATNFLIATNISAYDYWGQGTQVTVSS

SEQ ID NO: 281 - protein, 123 aa, synthetic construct
EVQLVESGGGLVQAGGSLRLSCAASGRTFSSYGMGWFRQAPGEGREFVAAISQSGGRTRYSDSVKGRFTISRDNAKNMVYLQMHSLKPEDTAVYYCAATDFLIATTISAYDYWGQGTQVTVSS

SEQ ID NO: 282 - protein, 123 aa, synthetic construct
EVQLVESGGGLVQAGGSLRLSCAASGRTFSSYGMGWFRQAPGKEREFVVAISGGGGRTRFSDSVKGRFTISRDNAKNMVYLQMNSLKPEDTAVYYCAASDFSIATTISAYDYWGQGTQVTVSS

SEQ ID NO: 283 - protein, 123 aa, synthetic construct
EVQLVESGGGLVQAGGSLSVSCAASGRTFSWNGMGWFRQAPGEEREFVAAISQSGGRTRYSDSVKGRFTISRDNAKNMVYLQMNSLKPEDTAVYYCAASDFLLATTMSAYVYWGQGTQVTVSS

SEQ ID NO: 284 - protein, 123 aa, synthetic construct
EVQLVESGGGLVQAGGSLRLSCAASGRTFTSFGMGWFRQAIGKEREFVAAISRSGGRTRYSDSVKGRFTISRDDAKNMVYLQMNSLKPEDTAVYYCAASYFLLAITISGYDYWGQGTQVTVSS

SEQ ID NO: 285 - protein, 123 aa, synthetic construct
EVQLVESGGGLVQAGGSLSVSCAASGRTLSGYGMGWFRQAPGGEREFVAAISQSGGRTRYSDSVKGRFTISRDNAKNMVYLQMNSLKPEDTAIYYCAASNFLLATTNSAYGYWGQGTQVTVSS

SEQ ID NO: 286 - protein, 123 aa, synthetic construct
EVQLVESGGGLVQAGGSLSVSCAASGRTLSGYGMGWFRQAPGEEREFVAAISQSGGRTRYSDSVKGRFTISRDNAKNMVYLQMNSLKPGDTAIYYCAASNFLLATTNSAYDYWGQGTQVTVSS

SEQ ID NO: 287 - protein, 123 aa, synthetic construct
EVQLVESGGGLVQAGGSLSVSCAASGRTFSWNGMGWFRQAPGEEREFVAAISQSGGRTRYSDSVKGRFTISRDNAKNMVYLQMNSLRPEDTAVYYCAASDFLLATTISAYDYWGQGTQVTVSS

SEQ ID NO: 288 - protein, 123 aa, synthetic construct
EVQLVESGGGLVQAGGSLSVSCAASGRTFSWNGMGWFRQAPGEEREFVAAISQSGGRTRYSDSVKGRFTISRDNAKNRVYLQMNSLKPEDTAVYYCAASDFLLATTISAYDYWGQGTQVTVSS

SEQ ID NO: 289 - protein, 123 aa, synthetic construct
EVQLVESGGGLVQAGGSLSVSCAASGRTFSWNGMGWFRQAPGEEREFVAAISQSGGRTRYSDSVKGRFTISRDNAKNMVYLRMNSLKPEDTAVYYCAASDFLLATTISAYDYWGQGTQVTVSS

SEQ ID NO: 290 - protein, 123 aa, synthetic construct
EVQLVESGGGLVQAGGSLSVSCAASGRTFSRNGMGWFRQAPGEEREFVAAISQSGGRTRYSDSVKGRFTISRDNAKNMVYLQMNSLKPEDTAVYYCAASDFLLATTISAYDYWGQGTQVTVSS

SEQ ID NO: 291 - protein, 123 aa, synthetic construct
EVQLVESGGGLVQAGGSPSVSCAASGRTFSWNGMGWFRQAPGEEREFVAAISQSGGRTRYSDSVKGRFTISRDNAKNMVYLQMNSLKPEDTAVYYCAASDFLLATTISAYDYWGQGTQVTVSS

SEQ ID NO: 292 - protein, 123 aa, synthetic construct
EVQLVESGGGLVQAGGSLRLSCAASGRTFSSYGMGWFRQAPGKEREFVVAISGSGGRTRFSDSVKGRFTISRDNAKNMVYLQMNSLKPEDTAVYYCAASDFFIATSISAYDYWGQGTQVTVSS

SEQ ID NO: 293 - protein, 123 aa, synthetic construct
EVQLVESGGGLVQAGGSLRLSCAASGRTFSSYGMGWFRQAPGKEREFVVAISGGGGRTRFSDSVKGRFTISRDNAESMVYLQMNSLKPEDTAVYYCAASDFLIATTLSAYDYWGQGTQVTVSS

SEQ ID NO: 294 - protein, 123 aa, synthetic construct
EVQLVESGGGLVQAGGSLSVSCAASGRTLSGYGMGWFRQAPGEEREFVAAISQSGGRTRYSDPVKGRFTISRDNAKNMVYLQMNSLKPEDTAIYYCAASNFLLATTNSAYDYWGQGTQVTVSS

SEQ ID NO: 295 - protein, 123 aa, synthetic construct
EVQLVESGGGLVQAGGSLRLSCAASGRTFSSYGMGWFRQAPGKEREFVVAISGSGGRTRFSDSVKGRFTISRDNAKNMVYLQMNSLKPEDTAVYYCAASYFLIATTLSAYDYWGQGTQVTVSS

SEQ ID NO: 296 - protein, 123 aa, synthetic construct
EVQLVESGGGLVQAGGSLRLSCAASGRTFSSYGMGWFRQAPGEEREFVAAISQSGGRTRYSDSVKGRFTISRDNAKNMVYLQMNSLKPEDTAVYYCAATNFLIATTRSAYDYWGQGTQVTVSS

SEQ ID NO: 297 - protein, 123 aa, synthetic construct
EVQLVESGGGLVQAGGSLRLSCAASGRTFASFGMGWFRQAIGKEREFVAAISRSGGRTRYSDSVKGRFTISRDDAKNRVYLQMNSLKPEDTAVYYCAASYFLLATTMSGYDFWGQGTQVTVSS

SEQ ID NO: 298 - protein, 123 aa, synthetic construct
EVQLVESGGGLVQAGGSLRLSCAASGRTFASFGMGWFRQAIGKEREFVAAISRSGGRTRYSDSVKGRFTISRDDAKNRVYLQMNSLKPEDTAVYYCAASYFLLATTIFGYDFWGQGTQVTVSS

SEQ ID NO: 299 - protein, 123 aa, synthetic construct
EVQLVESGGGLVQAGGSLSVSCAASRRTLSGYGMGWFRQAPGEEREFVAAISQSGGRTRYSDSVKGRFTISRDDAKNMVYLQMNSLKPEDTAIYYCAASNFLLATTNSAYDYWGQGTQVTVSS

SEQ ID NO: 300 - protein, 123 aa, synthetic construct
EVQLVESGGGLVQAGGSLSVSCAASGRTFSWNGMGWFRQAPGEEREFVAAISQSGGRTRYSDSVKGRFTISRDNAKNMVYLQMNSLKPEDTAVYYCAASDSLLATTIPAYDYWGQGTQVTVSS

SEQ ID NO: 301 - protein, 123 aa, synthetic construct
EVQLVESGGGLVQAGGSLRLSCAASGRTFSSYGMGWFRQAPGEEREFVAAISQGGGRTRYSDSVKGRFTISRDNAKNMVYLQMNSLKPEDTAVYYCAATNFLLATTISAYDYWGQGTQVTVSS

SEQ ID NO: 302 - protein, 123 aa, synthetic construct
EVQLVESGGGLVQAGGSLRLSCAASGRTFSSYGMGWFRQAPGEEREFVAAISQSGGRTRYSDSVKGRFTISRDNAENMVYLQMNSLKPEDTAVYYCAATNFLIATTISAYNYWGQGTQVTVSS

SEQ ID NO: 303 - protein, 123 aa, synthetic construct
EVQLVESGGGLVQAGGSLRLSCAASGRTFSSYGMGWFRQAPGEEREFVAAISQSGGRTRYSDSVKGRFTISRDNAKNMVYLQMNSLKPEDTAVYYCAATNFQIATTISAYDYWGQGTQVTVSS

SEQ ID NO: 304 - protein, 123 aa, synthetic construct
EVQLVESGGGLVQAGGSLRLSCAASGRTFSSYGMGWFRQAPGEEREFVAAISQSGGRARYSDSVKGRFTISRDNAKNMVYLQMNSLKPEDTAVYYCAATNFLIAATISAYDYWGQGTQVTVSS

SEQ ID NO: 305 - protein, 123 aa, synthetic construct
EVQLVESGGGLVQAGGSLRLSCAASGRTFSSYGMGWFRQAPGEEREFVAAISQSGGRTRYSDSVKGRFTISRDNAKNMVYLQMNSLKPEDTAVYYCAATNFLIATTVSAYDYWGQGTQVTVSS

SEQ ID NO: 306 - protein, 123 aa, synthetic construct
EVQLVESGGGLVQAGGSLRLSCAASGRTFSSYGMGWFRQAPGEEREFVVAISGSGGRSRFSDSVKGRFTISRDNAKNMVYLQMNSLKPEDTAVYYCAASYFLMATSISAYDYWGQGTQVTVSS

SEQ ID NO: 307 - protein, 123 aa, synthetic construct
EVQLVESGGGLVQAGGSLRLSCAASGRTFASFGMGWFRQAIGKEREFVAAISRSGGRTRYSDSVKGRFTISRDDAKNRVYLQMNSLKPEDTAVYYCAASYFLLAATISGYDFWGQGTQVTVSS

SEQ ID NO: 308 - protein, 123 aa, synthetic construct
EVQLVESGGGLVQAGGSLRLSCAASGRTFASFGMGWFRQAIGKEREFVAAISRSGGRTRYSDSVKGRFTISRDDAKNRVYLQMNSLKPEDTAVYYCAASYFLRATTISGYDFWGQGTQVTVSS

SEQ ID NO: 309 - protein, 123 aa, synthetic construct
EVQLVESGGGLVQAGGSLRLSCAASGRTFSSYGMGWFRQAPGKEREFVVAISGSGGRTRFSDSVKGRFTISRDNAENMVYLQMNSLKPEDTAVYYCAASDFLIATTISVYDYWGQGTQVTVSS

SEQ ID NO: 310 - protein, 123 aa, synthetic construct
EVQLVESGGGLVQAGGSLRLSCAASGRTFSSYGMGWFRQAPGKEREFVVAISGSGGRTRFSDSVKGRFTISRDNAKNMVYLQMNSLKPEDTAVYYCAASYFLVATSISAYDYWGQGTQVTVSS

SEQ ID NO: 311 - protein, 123 aa, synthetic construct
EVQLVESGGGLVQAGGSLRLSCAASGRTFSSYGMGWFRQAPGEEREFVAAISQSGGRTRYSDSVKGRFTISRDNAKNMVYLQMNSLKPEDTAVYYCAATNFLIATTIYAYDYWGQGTQVTVSS

SEQ ID NO: 312 - protein, 123 aa, synthetic construct
EVQLVESGGGLVQAGGSLRLSCAASGRTFSSYGMGWFRQAPGKEREFVVAISGSGGRTRFSDSAKGRFTISRDNAENMVYLQMNSLKPEDTAVYYCAASDFLIATTISAYDHWGQGTQVTVSS

SEQ ID NO: 313 - protein, 123 aa, synthetic construct
EVQLVESGGGLVQAGGSLRLSCAASGRTFSSYGMGWFRQAPGKEREFVVAISASGGRTRFSDSVKGRFTISRDNAKNMVYLQMNSLKPEDTAVYYCAASYFLLATTMSAYDYWGQGTQVTVSS

SEQ ID NO: 314 - protein, 123 aa, synthetic construct
EVQLVESGGGLVQAGGSLSVSCAASGRTFSWYGMGWFRQAPGEEREFVAAISQSGGRTRYSDSVKGRFTISRDNAKNMVYLQMNSLKPEDTAVYYCAASDFLLATTISAYDYWGQGTQVTVSS

SEQ ID NO: 315 - protein, 123 aa, synthetic construct
EVQLVESGGGLVQAGGSLRLSCAASGRTFASFGMGWFRQAIGKEREFVAAISRSGGRTRYSDSVKGRFTISRDDAKNRVYLQMNSLKPEDTAVYYCAASYVLLATTISGYDFWGQGTQVTVSS

SEQ ID NO: 316 - protein, 123 aa, synthetic construct
EVQLVESGGGLVQAGGSLRLSCAASGRTFSSYGMGWFRQAPGKEREFVVAISGSGGRTRFSDSVKGRFTISRDNAKNMVYLQMNSLKPEDTAVYYCAASYFLMATSISAYDYWGQGTQVTVSS

SEQ ID NO: 317 - protein, 123 aa, synthetic construct
EVQLVESGGGLVQAGGSLRLSCAASGRTFASFGMGWFRQAIGREREFVAGISQSGGRTRYSDSVKGRFTISRDDTKNMVYLQMNSLKPEDTAVYYCAASYFLIANTISGYDYWGQGTQVTVSS

SEQ ID NO: 318 - protein, 123 aa, synthetic construct
EVQLVESGGGLVQAGGSLRLSCAASGRTFTSFGMGWFRQAIGKEREFVAAISRSGGRTRYSDSVKGRFTISRDDAKNMVYLQMNSLKPEDTAVYYCAASSFLLAITISGYDYWGQGTQVTVSS

SEQ ID NO: 319 - protein, 123 aa, synthetic construct
EVQLVESGGGLVQAGGSLSVSCAASGRTFSWNGMGWFRQAPGEEREFVAAISQSGGRTRYSDSVKGRFTISRDNAKNMVYLQMNSLKPEDTAIYYCAASNFLLATTNSAYDYWGQGTQVTVSS

SEQ ID NO: 320 - protein, 123 aa, synthetic construct
EVQLVESGGGLVQAGGSLRLSCAASGRTFSSYGMGWFRQAPGKEREFVVAISGGGGRTRFSDSVKGRFTISRDNAKNMVYLQMDSLKPEDTAVYYCAASDFLIATTIPAYDYWGQGTQVTVSS

SEQ ID NO: 321 - protein, 123 aa, synthetic construct
EVQLVESGGGLVQAGGSLSVSCAASGRTFSWNGMGWFRQAPGEEREFVAAISQSGGRTRYSDSVKGRFTISRDNAKNMVYLQMNSLKPEDTAVYYCAASDFLLATTISGYDFWGQGTQVTVSS

SEQ ID NO: 322 - protein, 123 aa, synthetic construct
EVQLVESGGGLVQAGGSLRLSCAASGRTFSSYGMGWFRQAPGEEREFVAAISQSGGRTRYSDSVKGRFTISRDNAKNMVYLQMNSLKPEDTAVYYCAATDFLIATTISAYDYWGQGTQVTVSS

SEQ ID NO: 323 - protein, 123 aa, synthetic construct
EVQLVESGGGLVQAGGSLRLSCAASGRTFSSYGMGWFRQAPGEEREFVAAISQSGGRTRYSDSVKGRFTISRDNAKNMVYLQMNSLKPEDTAVYYCAATNFLIATTISEYDYWGQGTQVTVSS

SEQ ID NO: 324 - protein, 123 aa, synthetic construct
EVQLVESGGGLVQAGGSLRLSCAASGRTFSSYGMGWFRQAPGEEREFVAAISQSGGRTRYSDSVKGRFTISRDNAKNMVYLQMNSLKPEDTAVYYCASTNFLIATTISAYDYWGQGTQVTVSS

SEQ ID NO: 325 - protein, 123 aa, synthetic construct
EVQLVESGGGLVQAGGSLRLSCAASGRTFSSYGMGWFRQAPGEEREFVAAISQSGGRTRYSDSVKGRFTISRDNAKNMVYLQMNSLKPEDTAVYYCAATNFLIATTLSAYDYWGQGTQVTVSS

SEQ ID NO: 326 - protein, 123 aa, synthetic construct
EVQLVESGGGLVQAGGSLRLSCAASGRTFSSYGMGWFRQAPGEEREFVAAISQSGGRTRYSDSVKGRFTISRDNAKNMVYLQMNSLKPEDTAVYYCAATNFLIATTISAYVYWGQGTQVTVSS

SEQ ID NO: 327 - protein, 123 aa, synthetic construct
EVQLVESGGGLVQAGGSLRLSCAASGRTFADFGMGWFRQAIGKEREFVAAISRSGGRTRYSDSVKGRFTISRDDAKNMVYLQMNSLKPEDTAVYYCAASYFLLAITISAYDYWGQGTQVTVSS

SEQ ID NO: 328 - protein, 123 aa, synthetic construct
EVQLVESGGGLVQAGGSLRLSCAASGRTFASFGMGWFRQAIGKEREFVAAISRSGGRTRYSDSVKGRFTISRDDAKNRVYLQMNSLKPEDTAVYYCAASYLLLATTISGYDFWGQGTQVTVSS

SEQ ID NO: 329 - protein, 123 aa, synthetic construct
EVQLVESGGGLVQAGGSLRLSCAASGRTFSSYGMGWFRQAPGEEREFVAAISQSGGRTRYPDSVKGRFTISRDNAKNMVYLQMNSLKPEDTAVYYCAATNFLIATTISAFDYWGQGTQVTVSS

SEQ ID NO: 330 - protein, 123 aa, synthetic construct
EVQLVESGGGLVQAGGSLRLSCAASGRTFSSYGMGWFRQAPGEEREFVAAISQSGGRTRYSDSVKGRFTISRDNAKNMVYLQMNSLKPEDTAVYYCAATNFLISTTISAYDYWGQGTQVTVSS

SEQ ID NO: 331 - protein, 123 aa, synthetic construct
EVQLVESGGGLVQAGGSLSVSCAASGRTFSWNGMGWFRQAPGEEREFVAAISQSGGRTRYSDSVKGRFTISRDNAKNMVYLQMNSLKPEDTAVYYCAASDFLLATTMSAYGYWGQGTQVTVSS

SEQ ID NO: 332 - protein, 123 aa, synthetic construct
EVQLVESGGGLVQAGGSLSVSCAASGRTFSWNGMGWFRQAPGEEREFVAAISQSGGRTRYSDSVKGRFTISRDNAKNMVYLQMNSLKPEDTAVYYCVASDFLLATTISAYDYWGQGTQVTVSS

SEQ ID NO: 333 - protein, 123 aa, synthetic construct
EVQLVESGGGLVQAGGSLRLSCAASGRTFASFGMGWFRQAMGKEREFVAAISRSGGRTRYSDSVKGRFTISRDDAKNRVYLQMNSLKPEDTAVYYCAASYFLLATTISGYDFWGQGTQVTVSS

SEQ ID NO: 334 - protein, 123 aa, synthetic construct
EVQLVESGGGLVQAGGSLRLSCAASGRTFASFGMGWFRQAIGKEREFVAAISRSGGRTRYSDSVKGRFTISRDGAKNRVYLQMNSLKPEDTAVYYCAASYFLLATTISGYDFWGQGTQVTVSS

SEQ ID NO: 335 - protein, 123 aa, synthetic construct
EVQLVESGGGLVQAGGSLRLSCAASGRTFSNYGMGWFRQAPGKEREFVVAISSSGGRTRFSDSVKGRFTISRDNAKNMVYLQMNNLKPEDTAVYYCAASDFLIATTISAYDYWGQGTQVTVSS

SEQ ID NO: 336 - protein, 123 aa, synthetic construct
EVQLVESGGGLVQAGGSLRLSCAASGRTFSSYGMGWFRQAPGEEREFVAAISQSGGRTRYSDSVKGRFTISRDNAKNMVYLQMNGLKPEDTAVYYCAATNFLITTTISAYDYWGQGTQVTVSS

SEQ ID NO: 337 - protein, 123 aa, synthetic construct
EVQLVESGGGLVQAGGSLRLSCAASGRTFSSYGMGWFRQAPGEEREFVAAISQSGGRTRYSDSVKGRFTISRDNAKNMVYLQMNSLKPEDTAVYYCAATNFLIATIISAYDYWGQGTQVTVSS

SEQ ID NO: 338 - protein, 123 aa, synthetic construct
EVQLVESGGGLVQAGGSLRLSCAASGRTFSSYGMGWFRQAPGEEREFVAAISQSGGRTRYSDSVKGRFTISRDNAKNMVYLQMNSLKPEDTAVYYCAATSFLIATTISAYDYWGQGTQVTVSS

SEQ ID NO: 339 - protein, 123 aa, synthetic construct
EVQLVESGGGLVQAGGSLRLPCAASGRTFSSYGMGWFRQAPGEEREFVAAISQSGGRTRYSDSVKGRFTISRDNAKNMVYLQMNSLKPEDTAVYYCAATNFLTATTISAYDYWGQGTQVTVSS

SEQ ID NO: 340 - protein, 123 aa, synthetic construct
EVQLVESGGGLVQAGGSLRLSCAASGRTFSSYNVGWFRQAPGEEREFVAAISQSGGRTRYSDSVKGRFTISRDNAKNMVYLQMNSLKPEDTAVYYCATTNFLIATTISAYDYWGQGTQVTVSS

SEQ ID NO: 341 - protein, 123 aa, synthetic construct
EVQLVESGGGLVQAGGSLRLSCAASGRTFASFGMGWFRQAIGKEREFVAAISRSGGRTRYSDSVKGRFTISRDDAKNRVYLQMNSLKPEDTAVYYCAASYFPLATTISGYDFWGQGTQVTVSS

SEQ ID NO: 342 - protein, 123 aa, synthetic construct
EVQLVESGGGLVQAGGSLSVSCAASGRTLSGYGMGWFRQAPGEEREFVAAISQSGGRTRYSDSVKGRFTISRDNAKNMVYLQMNSLKPEDAAIYYCAASNFLLATANSAYDYWGQGTQVTVSS

SEQ ID NO: 343 - protein, 111 aa, synthetic construct
EVQLVESGGGLVQPGGSLRLSCAASGRSFSTLIMAWYRQAPGKQRELVATVDRDGTATYADSVKGRFTISRDNAKNTVYLQMNSLRPEDTAVYYCNALLYWGQGTQVTVSS

SEQ ID NO: 344 - protein, 111 aa, synthetic construct
EVQLVESGGGLVQPGGSLRLSCAASGRSFSTLIMAWYRQAPGKQRELVATVDRDGTATYADSVKGRFTISRDNAKNTVYLQMNSLRPEDTAVYYCNALQYWGQGTQVTVSS

SEQ ID NO: 345 - protein, 111 aa, synthetic construct
EVQLVESGGGLVQPGGSLRLSCAASGRSFSTLIMAWYRQAPGKQRELVATIERDGTTTYADSVKGRFTISRDNAKNTVYLQMNSLRPEDTAVYYCNALGYWGQGTQVTVSS

SEQ ID NO: 346 - protein, 111 aa, synthetic construct
EVQLVESGGGLVQPGGSLRLSCAASGRSFSTLIMAWYRQAPGKQRELVATVDRDGTATYADSVKGRFTISRDNAKNTVYLQMNSLRPEDTAVYYCNALPYWGQGTQVTVSS

SEQ ID NO: 347 - protein, 111 aa, synthetic construct
EVQLVESGGGLVQPGGSLRLSCAASGRSFSTLIMAWYRQAPGKQRELVATIERDGTTTYADSVKGRFTISRDNTKNTVYLQMNSLRPEDTAVYYCNALPYWGQGTQVTVSS

SEQ ID NO: 348 - protein, 111 aa, synthetic construct
EVQLVESGGGLVQPGGSLRLSCAASGRSFSTLIMAWYRQAPGKQRELVATIERDGTPTYADSVKGRFTISRDNAKNTVYLQMNSLRPEDTAVYYCNALQYWGQGTQVTVSS

SEQ ID NO: 349 - protein, 111 aa, synthetic construct
EVQLVESGGGLVQPGGSLRLSCAVSGMPFDRISLGWYRQAPGKQRELVARITALDDTFYADSVKGRFTISRDNAKNTVYLQMNSLRPEDTAVYYCNALSYWGQGTQVTVSS

SEQ ID NO: 350 - protein, 111 aa, synthetic construct
EVQLVESGGGLVQPGGSLRLSCAVSGMPFDRISLGWYRQAPGKQRELVARITMLDETFYADSVKGRFTISRDNAKNTVYLQMNSLRPEDTAVYYCNALSYWGQGTQVTVSS

SEQ ID NO: 351 - protein, 111 aa, synthetic construct
EVQLVESGGGLVQPGGSLRLSCAASGRSFSTLIMAWYRQAPGKQRELVATVDRDGTATYADSVKGRFTISRDNAKNTVYLQMNSLRPEDTAVYYCNALWYWGQGTQVTVSS

SEQ ID NO: 352 - protein, 111 aa, synthetic construct
EVQLVESGGGLVQPGGSLRLSCAASGRKFSTLIMAWYRQAPGKQRELVATVDRDGTTTYADSVKGRFTISRDNAKNTVYLQMNSLRPEDTAVYYCNALHYWGQGTQVTVSS

SEQ ID NO: 353 - protein, 111 aa, synthetic construct
EVQLVESGGGLVQPGGSLRLSCAASGRSFSTLIMAWYRQAPGKQRELVATIDRDGTTMYADSVKGRFTISRDNAKNTVYLQMNSPRREDTAVYYCNALHYWGQGTQVTVSS

SEQ ID NO: 354 - protein, 111 aa, synthetic construct
EVQLVESGGGLVQPGGSLRLSCAASGRIFSSLIMTWYRQAPGKKREFVATIGTSGNTYYADSVKGRFTISRDDAKNTVYLQMNSLRPEDTAVYYCNTLLYWGQGTQVTVSS

SEQ ID NO: 355 - protein, 111 aa, synthetic construct
EVQLVESGGGLVQPGGSLRLSCAASGRSFSTLIMAWYRQAPGKQRELVATIERDGTPTYADSVKGRFTISRDNAKNTVYLQMNSLRPEDTAVYYCNALGYWGQGTQVTVSS

SEQ ID NO: 356 - protein, 111 aa, synthetic construct
EVQLVESGGGLVQPGGSLRLSCAASGRSFSTLIMAWYRQAPGKQRELVATIERGGTPTYADSVKGRFTISRDNAKNTVYLQMNSLRPEDTAVYYCNALGYWGQGTQVTVSS

SEQ ID NO: 357 - protein, 111 aa, synthetic construct
EVQLVESGGGLVQPGGSLRLSCAASGRSFSTLIMGWYRQAPGKQRELVATIERGGTTTYADSVKGRFTISRDNAKNTVYLQMNSLRPEDTAVYYCNALWYWGQGTQVTVSS

SEQ ID NO: 358 - protein, 111 aa, synthetic construct
EVQLVESGGGLVQPGGSLRLSCAASGRSFSTLIMAWYRQAPGKQRELVATIERDGTPTYADSVKGRFTISRDNAKNTVYLQMNSLRPEDTAVYYCNALLYWGQGTQVTVSS

SEQ ID NO: 359 - protein, 111 aa, synthetic construct
EVQLVESGGGLVQPGGSLRLSCATSGRSFSTLIMAWYRQAPGKQRELVATINRDSTTDYADSVKGRFTISRDNAKNTVYLQMNSLRPEDTAVYYCNALGYWGQGTQVTVSS

SEQ ID NO: 360 - protein, 111 aa, synthetic construct
EVQLVESGGGLVQPGGSLRLSCAASGRSFSTLIMAWYRQAPGKQRELVATIERDGTTTYADSVKGRVTISRDNAKNTVYLQMNSLRPEDTAVYYCNALPYWGQGTQVTVSS

SEQ ID NO: 361 - protein, 111 aa, synthetic construct
EVQLVESGGGLVQPGGSLRLSCAASGRSFSTLIMAWYRQAPGKQRELVATIERDGTTTYADSVKGRFTISRDNTKNTVYLQMNSLRPEDTAVYYCNALLYWGQGTQVTVSS

SEQ ID NO: 362 - protein, 111 aa, synthetic construct
EVQLVESGGGLVQPGGSLRLSCAASGRSFSTLIMAWYRQAPGKQRELVATIERGGTTTYADSVKGRFTASRDNAKNTVYLQMNSLRPEDTAVYYCNALGYWGQGTQVTVSS

SEQ ID NO: 363 - protein, 111 aa, synthetic construct
EVQLVESGGGLVQPGGSLRLSCAASGRRFSTLIMAWYRQAPGKQRELVATAERDGTTTYADSVKGRFTISRDNAKNTVYLQMNSLRPEDTAVYYCNALLYWGQGTQVTVSS

SEQ ID NO: 364 - protein, 111 aa, synthetic construct
EVQLVESGGGLVQPGGSLRLSCAASGRRFSTLIMAWYRQAPGKQRELVATAERDGTTTYADSVKGRFTISRDNAKNTVYLQMNSLRPEDTAVYYCNALPYWGQGTQVTVSS

SEQ ID NO: 365 - protein, 111 aa, synthetic construct
EVQLVESGGGLVQPGGSLRLSCAASGRSFSTLIMAWYRQAPGKQRELVATIERDSTPTYADSVKGRFTISRDNAKNTVYLQMNSLRPEDTAVYYCNALWYWGQGTQVTVSS

SEQ ID NO: 366 - protein, 111 aa, synthetic construct
EVQLVESGGGLVQPGGSLRLSCAASGRSFSTLIMAWYRQAPGKQRELVATIERDGTTTYADSVKGRFTFSRDNAKNTVYLQMNSLRPEDTAVYYCNALPYWGQGTQVTVSS

SEQ ID NO: 367 - protein, 111 aa, synthetic construct
EVQLVESGGGLVQPGGSLRLSCAASGRSFSTLIMAWYRQAPGKQRELVATIDRDGTATYADSVKGRFTISRDNAKNTVYLQMNSLRPEDTAVYYCNALWYWGQGTQVTVSS

SEQ ID NO: 368 - protein, 111 aa, synthetic construct
EVQLVESGGGLVQPGGSLRLSCAASGRSFSTLIMAWYRQAPGKQRELVATIDRGGTTTYADSVKGRFTISRDNAKNTVYLQMNSLRPEDTAVYYCNALLYWGQGTQVTVSS

SEQ ID NO: 369 - protein, 111 aa, synthetic construct
EVQLVESGGGLVQPGGSLRLSCAASGRSFSTLIMAWYRQAPGKQRELVATIERDGTTTYADSVKGRFTISRDNTKNTVYLQMNSLRPEDTAVYYCNALQYWGQGTQVTVSS

SEQ ID NO: 370 - protein, 111 aa, synthetic construct
EVQLVESGGGLVQPGGSLRLSCAASGRSFSTLIMAWYRQAPGKQRELVATIDRGGTTTYADSVKGRFTISRDNAKNTVYLQMNSLRPEDTAVYYCNALWYWGQGTQVTVSS

SEQ ID NO: 371 - protein, 111 aa, synthetic construct
EVQLVESGGGLVQPGGSLRLSCAASGRSFSTLIMGWYRQAPGKQRELVATIERGGTTTYADSVKGRFTISRDNAKNTVYLQMNSLRPEDTAVYYCNALLYWGQGTQVTVSS

SEQ ID NO: 372 - protein, 111 aa, synthetic construct
EVQLVESGGGLVQPGGSLRLSCAASGRSFSTLIMAWYRQAPGKQRELVATIERDGTTTYADSVKGRVTISRDNAKNTVYLQMNSLRPEDTAVYYCNALWYWGQGTQVTVSS

SEQ ID NO: 373 - protein, 111 aa, synthetic construct
EVQLVESGGGLVQPGGSLRLSCAASGRSFSTLIMAWYRQAPGKQRELVATVDRDGTATYADSVKGRFTISRDNAKNTVYLQMNSLRPEDTAVYYCNALRNWGQGTQVTVSS

SEQ ID NO: 374 - protein, 111 aa, synthetic construct
EVQLVESGGGLVQPGGSLRLSCAASGRKFSTLIMAWYRQAPGKQRELVATVDRGGTTTYADSVKGRFTISRDNAKNTTYLQMNSLRPEDTAVYYCNALRNWGQGTQVTVSS

SEQ ID NO: 375 - protein, 111 aa, synthetic construct
EVQLVESGGGLVQPGGSLRLSCAASGRSFSTLIMGWYRQAPGKQRELVATINRDGTTTYADSVKGRFTISRDNAKNTVYLQMNSLRPEDTAVYYCNALRFWGQGTQVTVSS

SEQ ID NO: 376 - protein, 111 aa, synthetic construct
EVQLVESGGGLVQPGGSLRLSCAASGRSFSTLIMAWYRQAPGKQRELVATIERDGTPTYADSVKGRFTISRDNAKNTVYLQMNSLRPEDTAVYYCNALRLWGQGTQVTVSS

SEQ ID NO: 377 - protein, 111 aa, synthetic construct
EVQLVESGGGLVQPGGSLRLSCAASGRSFSTLIMAWYRQAPGKQRELVATVDRDGTATYADSVKGRFTISRDNAKNTVYLQMNSLRPEDTAVYYCNALRDWGQGTQVTVSS

SEQ ID NO: 378 - protein, 111 aa, synthetic construct
EVQLVESGGGLVQPGGSLRLSCAASGRSFSTLIMGWYRQAPGKQRELVATIERGGTTTYADSVKGRFTISRDNAKNTVYLQMNSLRPEDTAVYYCNALRDWGQGTQVTVSS

SEQ ID NO: 379 - protein, 111 aa, synthetic construct
EVQLVESGGGLVQPGGSLRLSCAASGRSFSTLIMAWYRQAPGKQRELVATVDRDGTATYADSVKGRFTISRDNAKNTVYLQMNSLRPEDTAVYYCNALRHWGQGTQVTVSS

SEQ ID NO: 380 - protein, 111 aa, synthetic construct
EVQLVESGGGLVQPGGSLRLSCAAAGRKFSTLIMAWYRQAPGKQRELVATIERDGTTSYADSVKGRFTISRDNAKNTVYLQMNSLRPEDTAVYYCNALRFWGQGTQVTVSS

SEQ ID NO: 381 - protein, 111 aa, synthetic construct
EVQLVESGGGLVQPGGSLRLSCAASGRSFSTLIMAWYRQAPGKQRELVATIERDGTTTYADSVKGRFTFSRDNAKNTVYLQMNSLRPEDTAVYYCNALRSWGQGTQVTVSS

SEQ ID NO: 382 - protein, 111 aa, synthetic construct
EVQLVESGGGLVQPGGSLRLSCAASGRSFSTLIMAWYRQAPGKQRELVATIERDGTTTYADSVKGRFTISRDNTKNTVYLQMNSLRPEDTAVYYCNALRHWGQGTQVTVSS

SEQ ID NO: 383 - protein, 111 aa, synthetic construct
EVQLVESGGGLVQPGGSLRLSCAASGRSFSTLIMAWYRQAPGKQRELVATIERDGTTTYADSVKGRFTISRDNTKNTVYLQMNSLRPEDTAVYYCNALRNWGQGTQVTVSS

SEQ ID NO: 384 - protein, 111 aa, synthetic construct
EVQLVESGGGLVQPGGSLRLSCAASGRSFSTLIMAWYRQAPGKQRELVATIERGGTATYADSVKGRFTISRDNAKNTVYLQMNSLRPEDTAVYYCNALRDWGQGTQVTVSS

SEQ ID NO: 385 - protein, 111 aa, synthetic construct
EVQLVESGGGLVQPGGSLRLSCAAAGRKFSTLIMAWYRQAPGKQRELVATIERDGTTSYADSVKGRFTISRDNAKNTVYLQMNSLRPEDTAVYYCNALRLWGQGTQVTVSS

SEQ ID NO: 386 - protein, 111 aa, synthetic construct
EVQLVESGGGLVQPGGSLRLSCAASGRTFSTLIMAWYRQAPGKQRELVATIERGGTTTYADSVKGRFTISRDNAKNTVYLQMNSLRPEDTAVYYCNALRNWGQGTQVTVSS

SEQ ID NO: 387 - protein, 111 aa, synthetic construct
EVQLVESGGGLVQPGGSLRLSCAASGRSFSTLIMAWYRQAPGKQRELVATIERDGTTTYADSVKGRFTISRDNAKNTVYLQMNSLRPEDTAVYYCNALRSWGQGTQVTVSS

SEQ ID NO: 388 - protein, 111 aa, synthetic construct
EVQLVESGGGLVQPGGSLRLSCAASGRSFSTLIMAWYRQAPGKQRELVATIERDGTPTYADSVKGRFTISRDNAKNTVYLQMNSLRPEDTAVYYCNALRSWGQGTQVTVSS

SEQ ID NO: 389 - protein, 111 aa, synthetic construct
EVQLVESGGGLVQPGGSLRLSCAASGRSFSTLIMAWYRQAPGKQRELVATIDRDGTTTYADSVKGRFTISRDNAKNTVYLQMNSLRPEDTAVYYCNALRRWGQGTQVTVSS

SEQ ID NO: 390 - protein, 111 aa, synthetic construct
EVQLVESGGGLVQPGGSLRLSCAASGRKFSTLIMAWYRQAPGKQRELVATIERDGTTTYADSVKGRFTISRDNAKNTVYLQMNSLRPEDTAVYYCNALRHWGQGTQVTVSS

SEQ ID NO: 391 - protein, 111 aa, synthetic construct
EVQLVESGGGLVQPGGSLRLSCAASGRSFSTLIMAWYRQAPGKQRELVATIERDGTTTYADSVKGRFTISRDNTKNTVYLQMNSLRPEDTAVYYCNALRDWGQGTQVTVSS

SEQ ID NO: 392 - protein, 111 aa, synthetic construct
EVQLVESGGGLVQPGGSLRLSCAASGRSFSTLIMAWYRQAPGKQRELVATIERDGTTTYADSVKGRVTISRDNAKNTVYLQMNSLRPEDTAVYYCNALRHWGQGTQVTVSS

SEQ ID NO: 393 - protein, 111 aa, synthetic construct
EVQLVESGGGLVQPGGSLRLSCAASGRSFSTLIMAWYRQAPGKQRELVATIERDGTTTYADSVKGRFTISRDNAKNTVYLQMNSLRPEDTAVYYCNALRCWGQGTQVTVSS

SEQ ID NO: 394 - protein, 111 aa, synthetic construct
EVQLVESGGGLVQPGGSLRLSCAASGRSFSTLIMGWYRQAPGKQRELVATIERDGTTTYADSVKGRFTISRDNAKNTVYLQMNSLRPEDTAVYYCNALRNWGQGTQVTVSS

SEQ ID NO: 395 - protein, 111 aa, synthetic construct
EVQLVESGGGLVQPGGSLRLSCAASGRSFSTLIMAWYRQAPGKQRDLVATIERDGTTTYADSVKGRFTISRDNAKNTVYLQMNSLRPEDTAVYYCNALRSWGQGTQVTVSS

SEQ ID NO: 396 - protein, 111 aa, synthetic construct
EVQLVESGGGLVQPGGSLRLSCAASGRSFSTLIMAWYRQAPGKQRERVATIERDGTTTYADSVKGRFTISRDNAKNTVYLQMNSLRPEDTAVYYCNALRDWGQGTQVTVSS

SEQ ID NO: 397 - protein, 111 aa, synthetic construct
EVQLVESGGGLVQPGGSLRLSCAASGRSFSTLIMAWYRQAPGKQRELVATIDRDGTTTYADSVKGRFTISRDNAKNTVYLQMNSLRPEDTAVYYCNALRHWGQGTQVTVSS

SEQ ID NO: 398 - protein, 111 aa, synthetic construct
EVQLVESGGGLVQPGGSLRLSCAASGRKFSTLIMGWYRQAPGKQRELVATIERDDTTTYADSVKGRFTISRDNAKNTVYLQMNSLRPEDTAVYYCKTLRYWGQGTQVTVSS

SEQ ID NO: 399 - protein, 111 aa, synthetic construct
EVQLVESGGGLVQPGGSLRLSCAASGRKFSTLIMGWYRQAPGKQRELVATIERDDTTTYADSVKGRFTISRDNAKNTVYLQMNSLRPEDTAVYYCTTLRYWGQGTQVTVSS

SEQ ID NO: 400 - protein, 111 aa, synthetic construct
EVQLVESGGGLVQPGGSLRLSCAASGRKFSTLIMAWYRQAPGKQRELVATIDRDGTTTYADSVKGRFTISRDNAKNTVYLQMNSLRPEDTAVYYCKTLRYWGQGTQVTVSS

SEQ ID NO: 401 - protein, 111 aa, synthetic construct
EVQLVESGGGLVQPGGSLRLSCAVSGRSFSTLIMAWYRQAPGKQRELVATIDRGGTTTYADSVKGRFTISRDNAKNTVYLQMNSLRPEDTAVYYCKTLRYWGQGTQVTVSS

SEQ ID NO: 402 - protein, 111 aa, synthetic construct
EVQLVESGGGLVQPGGSLRLSCAASGRKFSTLIMAWYRQAPGKQRELVATIDRDGTTTYADSVKGRFTISRDNAKNTVYLQMNSLRPEDTAVYYCSTLRYWGQGTQVTVSS

SEQ ID NO: 403 - protein, 122 aa, synthetic construct
EVQLLESGGGLAQPGGSLRLSCAASGFTFSSYAMSWVRQAPGKGLEWVSGIYSDGSGTYYADSVKGRFTISRDNAKNTVYLQMNSLRPEDTAVYYCAKGRHSGSYYPWDEYWGQGTQVTVSS

SEQ ID NO: 404 - protein, 122 aa, synthetic construct
EVQLLESGGGLAQPGGSLRLSCAASGFTFSSYAMSWVRQAPGKGLEWVSGIYSDGSGTYYADSVKGRFTISRDNAKNTVYLQMNSLRPEDTAVYYCAKGRLSGSYYPWDEYWGQGTQVTVSS

SEQ ID NO: 405 - protein, 122 aa, synthetic construct
EVQLLESGGGLAQPGGSLRLSCAASGFTFSYYAMSWVRQAPGKGLEWVSGIYSDGSGTYYADSVKGRFTISRDNAKNTVYLQMNSLRPEDTAVYYCAKGRHSGSYYPWDDYWGQGTQVTVSS

SEQ ID NO: 406 - protein, 122 aa, synthetic construct
EVQLLESGGGLAQPGGSLRLSCAASGFTFSNYAMSWVRQAPGKGLEWVSGIYSDGSGTYYADSVKGRFTISRDNAKNTVYLQMNSLRPEDTAVYYCAKGRNSGSYYPWDDYWGQGTQVTVSS

SEQ ID NO: 407 - protein, 122 aa, synthetic construct
EVQLLESGGGLAQPGGSLRLSCAASGFTFSNYAMSWARQAPGKGLEWVSGIYSDGSGTYYADSVKGRFTISRDNAKNTVYLQMNSLRPEDTAVYYCAKGRGSGSYYPWDDHWGQGTQVTVSS

SEQ ID NO: 408 - protein, 122 aa, synthetic construct
EVQLLESGGGLAQPGGSLRLSCAASGFTFSNYAMSWVRQAPGKGLEWVSGIYSDGSGTYYADSVKGRFTISRDNAKNTVYLQMNSLRPEDTAVYYCAKGRNSGSYFPWDDYWGQGTQVTVSS

SEQ ID NO: 409 - protein, 122 aa, synthetic construct
EVQLLESGGGLAQPGGSLRLSCAASGFTFSNYAMSWVRQAPGKGLEWVSGIYSDGSGTYYADSVKGRFTISRDNAKNTVYLQMNSLRPEDTAVYYCAKGRHSGSYYPWDEYWGQGTQVTVSS

SEQ ID NO: 410 - protein, 122 aa, synthetic construct
EVQLLESGGGLAQPGGSLRLSCAASGFTFSNYAMSWARQAPGKGLEWVSGIYSDGSGTYYADSVKGRFTISRDNAKNTVYLQMNSLRPEDTAVYYCAKGRGSGSYDPWDDYWGQGTQVTVSS

SEQ ID NO: 411 - protein, 122 aa, synthetic construct
EVQLLESGGGLAQPGGSLRLSCAASGFTFSNYAMSWARQAPGKGLEWVSGIYSDGSGTYYADSVKGRFTISRDNAKNTVYLQMNSLRPEDTAVYYCAKGRNSGSYYPWDEYWGQGTQVTVSS

SEQ ID NO: 412 - protein, 122 aa, synthetic construct
EVQLLESGGGLAQPGGSLRLSCAASGFTFSNYAMSWARQAPGKGLEWVSGIYSDGSGTYYADSVKGRFTISRDNAKNTVYLQMNSLRPEDTAVYYCAKGRNSGSYDPWDDYWGQGTQVTVSS

SEQ ID NO: 413 - protein, 122 aa, synthetic construct
EVQLLESGGGLAQPGGSLRLSCAASGFTFSSYAMSWVRQAPGKGLEWVSGIYSDGSGTYYADSVKGRFTISRDNAKNTVYLQMNSLRPEDTAVYYCAKGRHSGSYDPWDEYWGQGTQVTVSS

SEQ ID NO: 414 - protein, 122 aa, synthetic construct
EVQLLESGGGLAQPGGSLRLSCAASGFTFSNYAMSWVRQAPGKGLEWVSGIYSDGSDTYYADSVKGRFTISRDNAKNTVYLQMNSLRPEDTAVYYCAKGRNSGSYYPWDVYWGQGTQVTVSS

SEQ ID NO: 415 - protein, 122 aa, synthetic construct
EVQLLESGGGLAQPGGSLRLSCAASGFTFSNYAMSWARQAPGKGLEWVSGIYSDGSGTYYADSVKGRFTISRDNAKNTVYLQMNSLRPEDTAVYYCAKGRHSGSYYPWDDYWGQGTQVTVSS

SEQ ID NO: 416 - protein, 122 aa, synthetic construct
EVQLLESGGGLAQPGGSLRLSCAASGFTFSNYAMSWARQAPGKGLEWVSGIYSDGSGTYYADSVKGRFTISRDNAKNTVYLQMNSLRPEDTAVYYCAKGRNSGSFYPWDDYWGQGTQVTVSS

SEQ ID NO: 417 - protein, 122 aa, synthetic construct
EVQLLESGGGLAQPGGSLRLSCAASGFTFSNYAMSWARQAPGKGLEWVSGIYSDGSGTYYADSVKGRFTISRDNAKNTVYLQMNSLRPEDTAVYYCAKGRNSGSYYAWDDYWGQGTQVTVSS

SEQ ID NO: 418 - protein, 122 aa, synthetic construct
EVQLLESGGGLAQPGGSLRLSCAASGFTFSSYAMSWVRQAPGKGLEWVSGIYSDGSGTYYADSVKGRFTISRDNAKNTVYLQMNSLRPEDTAVYYCTKGRHSGSYYPWDEYWGQGTQVTVSS

SEQ ID NO: 419 - protein, 122 aa, synthetic construct
EVQLLESGGGLAQPGGSLRLSCAASGFTFSNYAMSWVRQAPGKGLEWVSGIYSDGSGTYYADSVKGRFTISRDNAKNTVYLQMNSLRPEDTAVYYCAKGRHSGSYYPRDEYWGQGTQVTVSS

SEQ ID NO: 420 - protein, 122 aa, synthetic construct
EVQLLESGGGLAQPGGSLRLSCAASGFTFSSYAMSWVRQAPGKGLEWVSGIYSDGSGTYYADSVKGRFTISRDNAKNTVYLQMNSLRPEDTAVYYCAKGRHRGSYYPWDEYWGQGTQVTVSS

SEQ ID NO: 421 - protein, 122 aa, synthetic construct
EVQLLESGGGLAQPGGSLRLSCAASGFTFSNYAMSWARQAPGKGLEWVSGIYSDGSGTYYADSVKGRFTISRDNAKNTVYLQMNSLRPEDTAVYYCAKGRNSGSDYPWDDYWGQGTQVTVSS

SEQ ID NO: 422 - protein, 122 aa, synthetic construct
EVQLLESGGGLAQPGGSLRLSCAASGFTFSNYAMSWVRQAPGKGLEWVSGIYSDGSGTYYADSVKGRFTISRDNAKNTVYLQMNSLRPEDTAVYYCAKGRHSGSYYPWDEHWGQGTQVTVSS

SEQ ID NO: 423 - protein, 122 aa, synthetic construct
EVQLLESGGGLAQPGGSLRLSCAASGFTFSSYAMSWVRQAPGKGLEWVSGIYSDGSGTYYADSVKGRFTISRDNAKNTVYLQMNSLRPEDTAVYYCAKGRHSGSYYPWDEHWGQGTQVTVSS

SEQ ID NO: 424 - protein, 122 aa, synthetic construct
EVQLLESGGGLAQPGGSLRLSCAASGFTFSNYAMSWARQAPGKGLEWVSGIYSDGSGTYYADSVKGRFTISRDNAKNTVYLQMNSLRPEDTAVYYCATGRGSGSYYPWDDYWGQGTQVTVSS

SEQ ID NO: 425 - protein, 122 aa, synthetic construct
EVQLLESGGGLAQPGGSLRLSCAASGFTFSNYAMSWARQAPGKGLEWVSGIYSDGSGTYYADSVKGRFTISRDNAKNTVYLQMNSLRPEDTAVYYCAKGRNSGSYYPWGDYWGQGTQVTVSS

SEQ ID NO: 426 - protein, 122 aa, synthetic construct
EVQLLESGGGLAQPGGSLRLSCAASGFTFSNYAMSWARQAPGKGLEWVSGIYSDGSGTYYADSVKGRFTISRDNAKNTVYLQMNSLRPEDTAVYYCAKGRNSGGYYPWDDYWGQGTQVTVSS

SEQ ID NO: 427 - protein, 122 aa, synthetic construct
EVQLLESGGGLAQPGGSLRLSCAASGFTFSNYAMSWARQAPGKGLEWVSGIYGDGSGTYYADSVKGRFTISRDNAKNTVYLQMNSLRPEDTAVYYCATGRGSGSYYPWDDYWGQGTQVTVSS

SEQ ID NO: 428 - protein, 122 aa, synthetic construct
EVQLLESGGGLAQPGGSLRLSCAASGFTFSNYAMSWVRQAPGKGLEWVSGIYSDGSGTYYADSVKGRFTISRDNAKNTVYLQMNSLRPEDTAVYYCANGRHSGSYYPWDEYWGQGTQVTVSS

SEQ ID NO: 429 - protein, 122 aa, synthetic construct
EVQLLESGGGLAQPGGSLRLSCAASGFTFSNYAMSWVRQAPGKGLEWVSGIYSDGSGTYYADSVKGRFTISRDNAKNTVYLQMNSLRPEDTAVYYCAKGSHSGSYYPWDEYWGQGTQVTVSS

SEQ ID NO: 430 - protein, 122 aa, synthetic construct
EVQLLESGGGLAQPGGSLRLSCAASGFTFSNYAMSWVRQAPGKGLEWVSGIYSDGSGTYYADSVKGRFTISRDNAKNTVYLQMNSLRPEDTAVYYCAKGRHGGSYYPWDEYWGQGTQVTVSS

SEQ ID NO: 431 - protein, 122 aa, synthetic construct
EVQLLESGGGLAQPGGSLRLSCAASGFTFSSYAMSWVRQAPGKGLEWVSGIYSDGSGTYYADSVKGRFTISRDNAKNTVYLQMNSLRPEDTAVYYCSKGRHSGSYYPWDEYWGQGTQVTVSS

SEQ ID NO: 432 - protein, 122 aa, synthetic construct
EVQLLESGGGLAQPGGSLRLSCAASGFTFSNYAMSWVRQAPGKGLEWVSGIYSDGSGTYYADSVKGRFTISRDNAKNTVYLQMNSLRPEDTAVYYCAKGRNSGGYYPWDDYWGQGTQVTVSS

SEQ ID NO: 433 - protein, 122 aa, synthetic construct
EVQLLESGGGLAQPGGSLRLSCAASGFTFSNYAMSWARQAPGKGLEWVSGIYSDGSGTYYADSVKGRFTISRDNAKNTVYLQMNSLRPEDTAVYYCAKGRNSGSYYTWDDYWGQGTQVTVSS

SEQ ID NO: 434 - protein, 122 aa, synthetic construct
EVQLLESGGGLAQPGGSLRLSCAASGFTFSNYAMSWVRQAPGKGLEWVSGIYSDGSGTYYADSVKGRFTISRDNAKNTVYLQMNSLRPEDTAVYYCSKGRHSGSYYPWDEYWGQGTQVTVSS

SEQ ID NO: 435 - protein, 122 aa, synthetic construct
EVQLLESGGGLAQPGGSLRLSCAASGFTFSSYAMSWVRQAPGKGLEWVSGIYSDGSGTYYADSVKGRFTISRDNAKNTVYLQMNSLRPEDTAVYYCAKGRHSGSDYPWDEYWGQGTQVTVSS

SEQ ID NO: 436 - protein, 122 aa, synthetic construct
EVQLLESGGGLAQPGGSLRLSCAASGFTFSNYAMSWARQAPGKGLEWVSGIYSDGSGTYYADSVKGRFTISRDNAKNTVYLQMNSLRPEDTAVYYCAKGRNSGSYYPWYDYWGQGTQVTVSS

SEQ ID NO: 437 - protein, 122 aa, synthetic construct
EVQLLESGGGLAQPGGSLRLSCAASGFTFSNYAMSWARQAPGKGLEWVSGIYGDGSGTYYADSVKGRFTISRDNAKNTVYLQMNSLRPEDTAVYYCAKGRGSGSYYPWDNYWGQGTQVTVSS

SEQ ID NO: 438 - protein, 122 aa, synthetic construct
EVQLLESGGGLAQPGGSLRLSCAASGFTFSNYAMSWVRQAPGKGLEWVSGIYSDGSGTYYADSVKGRFTISRDNAKNTVYLQMNSLRPEDTAVYYCAKGRHSGSYYPWEEYWGQGTQVTVSS

SEQ ID NO: 439 - protein, 122 aa, synthetic construct
EVQLLESGGGLAQPGGSLRLSCAASGFTFSSYAMSWVRQAPGKGLEWVSGIYSDGSGTYYADSVKGRFTISRDNAKNTVYLQMNSLRPEDTAVYYCANGRHSGSYYPWDEYWGQGTQVTVSS

SEQ ID NO: 440 - protein, 122 aa, synthetic construct
EVQLLESGGGLAQPGGSLRLSCAASGFTFSNYAMSWVRQAPGKGLEWVSGIYSDGSGTYYADSVKGRFTISRDNAKNTVYLQMNSLRPEDTAVYYCAKGRHSGSYDPWDEYWGQGTQVTVSS

SEQ ID NO: 441 - protein, 122 aa, synthetic construct
EVQLLESGGGLAQPGGSLRLSCAASGFTFSSYAMSWVRQAPGKGLEWVSGIYSDGSGTYYADSVKGRFTISRDNAKNTVYLQMNSLRPEDTAVYYCAKGSHSGSYYPWDEYWGQGTQVTVSS

SEQ ID NO: 442 - protein, 122 aa, synthetic construct
EVQLLESGGGLAQPGGSLRLSCAASGFTFSNYAMSWARQAPGKGLEWVSGIYSDGSGTYYADSVKGRFTISRDNAKNTVYLQMNSLRPEDTAVYYCAKGRNSVSYYPWDDYWGQGTQVTVSS

SEQ ID NO: 443 - protein, 122 aa, synthetic construct
EVQLLESGGGLAQPGGSLRLSCAASGFTFSNYAMSWVRQAPGKGLEWVSGIYSDGSGTYYADSVKGRFTISRDNAKNTVYLQMNSLRPEDTAVYYCAKGKHSGSYYPWDEYWGQGTQVTVSS

SEQ ID NO: 444 - protein, 122 aa, synthetic construct
EVQLLESGGGLAQPGGSLRLSCAASGFTFSNYAMSWARQAPGKGLEWVSGIYSDGSGTYYADSVKGRFTISRDNAKNTVYLQMNSLRPEDTAVYYCAKGRNRGSYYPWDDYWGQGTQVTVSS

SEQ ID NO: 445 - protein, 122 aa, synthetic construct
EVQLLESGGGLAQPGGSLRLSCAASGFTFSNYAMSWARQAPGKGLEWVSGIYSDGSGTYYADSVKGRFTISRDNAKNTVYLQMNSLRPEDTAVYYCAKGRNSGSYYHWDDYWGQGTQVTVSS

SEQ ID NO: 446 - protein, 122 aa, synthetic construct
EVQLLESGGGLAQPGGSLRLSCAASGFTFSSYAMSWVRQAPGKGLEWVSGIYSDGSGTYYADSVKGRFTISRDNAKNTVYLQMNSLRPEDTAVYYCATGRHSGSYYPWDEYWGQGTQVTVSS

SEQ ID NO: 447 - protein, 122 aa, synthetic construct
EVQLLESGGGLAQPGGSLRLSCAASGFTFSSYAMSWVRQAPGKGLEWVSGIYSDGSGTYYADSVKGRFTISRDNAKNTVYLQMNSLRPEDTAVYYCAKGRHSGSYYPWEEYWGQGTQVTVSS

SEQ ID NO: 448 - protein, 122 aa, synthetic construct
EVQLLESGGGLAQPGGSLRLSCAASGFTFSNYAMSWARQAPGKGLEWVSGIYSDGSGTYYADSVKGRFTISRDNAKNTVYLQMNSLRPEDTAVYYCAKGRNSGSYYPWDGYWGQGTQVTVSS

SEQ ID NO: 449 - protein, 122 aa, synthetic construct
EVQLLESGGGLAQPGGSLRLSCAASGFTFSNYAMSWVRQAPGKGLEWVSGIYSDGSGTYYADSVKGRFTISRDNAKNTVYLQMNSLRPEDTAVYYCAKGRHSGSDYPWDEYWGQGTQVTVSS

SEQ ID NO: 450 - protein, 122 aa, synthetic construct
EVQLLESGGGLAQPGGSLRLSCAASGFTFSNYAMSWARQAPGKGLEWVSGIYSDGSGTYYADSVKGRFTISRDNAKNTVYLQMNSLRPEDTAVYYCAKGRGSGSYYPWDGYWGQGTQVTVSS

SEQ ID NO: 451 - protein, 122 aa, synthetic construct
EVQLLESGGGLAQPGGSLRLSCAASGFTFSNYAMSWARQAPGKGLEWVSGIYSDGSGTYYADSVKGRFTISRDNAKNTVYLQMNSLRPEDTAVYYCAKVRNSGSYYPWDDYWGQGTQVTVSS

SEQ ID NO: 452 - protein, 122 aa, synthetic construct
EVQLLESGGGLAQPGGSLRLSCAASGFTFSNYAMSWVRQAPGKGLEWVSGIYSDGSGTYYADSVKGRFTISRDNAKNTVYLQMNSLRPEDTAVYYCAKVRNSGSYYPWDDYWGQGTQVTVSS

SEQ ID NO: 453 - protein, 122 aa, synthetic construct
EVQLLESGGGLAQPGGSLRLSCAASGFTFSNYAMSWARQAPGKGLEWVSGIYSDGSGTYYADSVKGRFTISRDNAKNTVYLQMNSLRPEDTAVYYCAKGRGSGSYYPWEDYWGQGTQVTVSS

SEQ ID NO: 454 - protein, 122 aa, synthetic construct
EVQLLESGGGLAQPGGSLRLSCAASGFTFSNYAMSWARQAPGKGLEWVSGIYSDGSGTYYADSVKGRFTISRDNAKNTVYLQMNSLRPEDTAVYYCAKGRNSGSYYPWEDYWGQGTQVTVSS

SEQ ID NO: 455 - protein, 122 aa, synthetic construct
EVQLLESGGGLAQPGGSLRLSCAASGFTFSNYAMSWARQAPGKGLEWVSGIYSDGSGTYYADSVKGRFTISRDNAKNTVYLQMNSLRPEDTAVYYCAKGRHSGSYYPWDEYWGQGTQVTVSS

SEQ ID NO: 456 - protein, 122 aa, synthetic construct
EVQLLESGGGLVQPGGSLRLSCAASGFTFSSYAMSWVRQAPGKGLEWVSGIYSDGSGTYYADSVKGRFTISRDNAKNTVYLQMNSLRPEDTAVYYCAKGRLSGSYYPWDEYWGQGTQVTVSS

SEQ ID NO: 457 - protein, 122 aa, synthetic construct
EVQLLESGGGLAQPGGSLRLSCAASGFTFSNYAMSWARQAPGKGLEWVSGIYSDGSGTYYADSVKGRFTISRDNAKNTVYLQMNSLRPEDTAVYYCAKGRHSGSYDPWDEYWGQGTQVTVSS

SEQ ID NO: 458 - protein, 122 aa, synthetic construct
EVQLLESGGGLAQPGGSLRLSCAASGFTFSNYAMSWARQAPGKGLEWVSGIYSDGSGTYYADSVKGRFTISRDNAKNTVYLQMNSLRPEDTAVYYCAKGWGSGSYYPWDDYWGQGTQVTVSS

SEQ ID NO: 459 - protein, 122 aa, synthetic construct
EVQLLESGGGLAQPGGSLRLSCAASGFTFSSYAMSWVRQAPGKGLEWVSGIYSDGSGTYYADSVKGRFTISRDNAKNTVYLQMNSLRPEDTAVYYCAKVRHSGSYYPWDEYWGQGTQVTVSS

SEQ ID NO: 460 - protein, 122 aa, synthetic construct
EVQLLESGGGLAQPGGSLRLSCAASGFTFSSYAMSWVRQAPGKGLEWVSGIYSDGSGTYYADSVKGRFTISRDNAKNTVYLQMNSLRPEDTAVYYCAKGRHSGSYYPRDEYWGQGTQVTVSS

SEQ ID NO: 461 - protein, 122 aa, synthetic construct
EVQLLESGGGLAQPGGSLRLSCAASGFTFSSYAMSWVRQAPGKGLEWVSGIYSDGSGTYYADSVKGRFTISRDNAKNTVYLQMNSLRPEDTAVYYCAKGRHSGRYYPWDEYWGQGTQVTVSS

SEQ ID NO: 462 - protein, 122 aa, synthetic construct
EVQLLESGGGLAQPGGSLRLSCAASGFTFSNYAMSWARQAPGKGLEWVSGIYSDGSGTYYADSVKGRFTISRDNAKNTVYLQMNSLRPEDTAVYYCAKGRNSGSHYPWDDYWGQGTQVTVSS

SEQ ID NO: 463 - protein, 122 aa, synthetic construct
EVQLLESGGGLAQPGGSLRLSCAASGFTFSNYAMSWARQAPGKGLEWVSGIYSDGSGTYYADSVKGRFTISRDNAKNTVYLQMNSLRPEDTAVYYCAKGRGSGSYHPWDDYWGQGTQVTVSS

SEQ ID NO: 464 - protein, 122 aa, synthetic construct
EVQLLESGGGLAQPGGSLRLSCAASGFTFSNYAMSWARQAPGKGLEWVSGIYSDGSGTYYADSVKGRFTISRDNAKNTVYLQMNSLRPEDTAVYYCAKGSGSGSYYPWDDYWGQGTQVTVSS

SEQ ID NO: 465 - protein, 122 aa, synthetic construct
EVQLLESGGGLAQPGGSLRLSCAASGFTFSNYAMSWARQAPGKGLEWVSGIYGDGSGTYYADSVKGRFTISRDNAKNTVYLQMNSLRPEDTAVYYCAKGRGSGGYYPWDDYWGQGTQVTVSS

SEQ ID NO: 466 - protein, 122 aa, synthetic construct
EVQLLESGGGLAQPGGSLRLSCAASGFTFSNYAMSWVRQAPGKGLEWVSGIYSDGSGTYYADSVKGRFTISRDNAKNTVYLQMNSLRPEDTAVYYCAKGRHSVSYYPWDEYWGQGTQVTVSS

SEQ ID NO: 467 - protein, 122 aa, synthetic construct
EVQLLESGGGLAQPGGSLRLSCAASGFTFSNYAMSWVRQAPGKGLEWVSGIYSDGSGTYYADSVKGRFTISRDNAKNTVYLQMNSLRPEDTAVYYCAKGRLSGSYYPWDEYWGQGTQVTVSS

SEQ ID NO: 468 - protein, 122 aa, synthetic construct
EVQLLESGGGLAQPGGSLRLSCAASGFTFSNYAMSWARQAPGKGLEWVSGIYSDGSGTYYADSVKGRFTISRDNAKNTVYLQMNSLRPEDTAVYYCAKGRNSGSYFPWDDYWGQGTQVTVSS

SEQ ID NO: 469 - protein, 122 aa, synthetic construct
EVQLLESGGGLAQPGGSLRLSCAASGFTFSNYAMSWARQAPGKGLEWVSGIYSDGSGTYYADSVKGRFTISRDNAKNTVYLQMNSLRPEDTAVYYCAKGRNSGRYYPWDDYWGQGTQVTVSS

SEQ ID NO: 470 - protein, 122 aa, synthetic construct
EVQLLESGGGLAQPGGSLRLSCAASGFTFSNYAMSWARQAPGKGLEWVSGIYGDGSGTYYADSVKGRFTISRDNAKNTVYLQMNSLRPEDTAVYYCAKGRGSGSYDPWDDYWGQGTQVTVSS

SEQ ID NO: 471 - protein, 122 aa, synthetic construct
EVQLLESGGGLAQPGGSLRLSCAASGFTFSSYAMSWVRQAPGKGLEWVSGIYSDGSGTYYADSVKGRFTISRDNAKNTVYLQMNSLRPEDTAVYYCAKGRHSGSYYPWYEYWGQGTQVTVSS

SEQ ID NO: 472 - protein, 122 aa, synthetic construct
EVQLLESGGGLAQPGGSLRLSCAASGFTFSNYAMSWARQAPGKGLEWVSGIYSDGSGTYYADSVKGRFTISRDNAKNTVYLQMNSLRPEDTAVYYCAKGRGSGSYYPWDAYWGQGTQVTVSS

SEQ ID NO: 473 - protein, 122 aa, synthetic construct
EVQLLESGGGLAQPGGSLRLSCAASGFTFSYYAMSWVRQAPGKGLEWVSGIYSDGSGTYYADSVKGRFTISRDNAKNTVYLQMNSLRPEDTAVYYCAKGRHSGSSYPWDDYWGQGTQVTVSS

SEQ ID NO: 474 - protein, 122 aa, synthetic construct
EVQLLESGGGLAQPGGSLRLSCAASGFTFSNYAMSWARQAPGKGLEWVSGIYSDGSGTYYADSVKGRFTISRDNAKNTVYLQMNSLRPEDTAVYYCAKGRHSGSYYPLDDYWGQGTQVTVSS

SEQ ID NO: 475 - protein, 122 aa, synthetic construct
EVQLLESGGGLAQPGGSLRLSCAASGFTFSYYAMSWVRQAPGKGLEWVSGIYSDGSGTYYADSVKGRFTISRDNAKNTVYLQMNSLRPEDTAVYYCAKGRHSGSYYPRDDYWGQGTQVTVSS

SEQ ID NO: 476 - protein, 122 aa, synthetic construct
EVQLLESGGGLAQPGGSLRLSCAASGFTFSNYAMSWARQAPGKGLEWVSGIYSDGSGTYYADSVKGRFTISRDNAKNTVYLQMNSLRPEDTAVYYCAKGRHSGSYDPWDDYWGQGTQVTVSS

SEQ ID NO: 477 - protein, 122 aa, synthetic construct
EVQLLESGGGLAQPGGSLRLSCAASGFTFSYYAMSWVRQAPGKGLEWVSGIYSDGSGTYYADSVKGRFTISRDNAKNTVYLQMNSLRPEDTAVYYCANGRHSGSYYPWDDYWGQGTQVTVSS

SEQ ID NO: 478 - protein, 122 aa, synthetic construct
EVQLLESGGGLAQPGGSLRLSCAASGFTFSNYAMSWARQAPGKGLEWVSGIYSDGSGTYYADSVKGRFTISRDNAKNTVYLQMNSLRPEDTAVYYCAKGRHSGSYYPWEDYWGQGTQVTVSS

SEQ ID NO: 479 - protein, 122 aa, synthetic construct
EVQLLESGGGLAQPGGSLRLSCAASGFTFSYYAMSWVRQAPGKGLEWVSGIYSDGSGTYYADSVKGRFTISRDNAKNTVYLQMNSLRPEDTAVYYCAKGRHSGSYYPWYDYWGQGTQVTVSS

SEQ ID NO: 480 - protein, 122 aa, synthetic construct
EVQLLESGGGLVQPGGSLRLSCAASGFTFSNYAMSWVRQAPGKGLEWVSGIYSDGSGTYYADSVKGRFTISRDNAKNTVYLQMNSLRPEDTAVYYCAKGKHSGSYYPWDDYWGQGTQVTVSS

SEQ ID NO: 481 - protein, 122 aa, synthetic construct
EVQLLESGGGLAQPGGSLRLSCAASGFTFSNYAMSWARQAPGKGLEWVSGIYSDGSGTYYADSVKGRFTISRDNAKNTVYLQMNSLRPEDTAVYYCAKGRHSGSYYPWDDHWGQGTQVTVSS

SEQ ID NO: 482 - protein, 122 aa, synthetic construct
EVQLLESGGGLAQPGGSLRLSCAASGFTFSNYAMSWARQAPGKGLEWVSGIYSDGSGTYYADSVKGRFTISRDNAKNTVYLQMNSLRPEDTAVYYCAKGRHSGSYYPRDDYWGQGTQVTVSS

SEQ ID NO: 483 - protein, 122 aa, synthetic construct
EVQLLESGGGLAQPGGSLRLSCAASGFTFSNYAMSWVRQAPGKGLEWVSGIYSDGSGTYYADSVKGRFTISRDNAKNTVYLQMNSLRPEDTAVYYCAKGKHSGSYYPWDDYWGQGTQVTVSS

SEQ ID NO: 484 - protein, 122 aa, synthetic construct
EVQLLESGGGLAQPGGSLRLSCATSGFTFSNYAMSWVRQAPGKGLEWVSGIYSDGSGTYYADSVKGRFTISRDNAKNTVYLQMNSLRPEDTAVYYCAKGKHSGSYYPWDDYWGQGTQVTVSS

SEQ ID NO: 485 - protein, 122 aa, synthetic construct
EVQLLESGGGLAQPGGSLRLSCAASGFTFSYYAMSWVRQAPGKGLEWVSGIYSDGSGTYYADSVKGRFTISRDNAKNTVYLQMNSLRPEDTAVYYCAKGRHSGSYYPWDDHWGQGTQVTVSS

SEQ ID NO: 486 - protein, 122 aa, synthetic construct
EVQLLESGGGLAQPGGSLRLSCAASGFTFSYYAMSWVRQAPGKGLEWVSGIYSDGSGTYYADSVKGRFTISRDNAKNTVYLQMNSLRPEDTAVYYCAKVRHSGSYYPWDDYWGQGTQVTVSS

SEQ ID NO: 487 - protein, 122 aa, synthetic construct
EVQLLESGGGLAQPGGSLRLSCAASGFTFSYYAMSWVRQAPGKGLEWVSGIYSDGSGTYYADSVKGRFTISRDNAKNTVYLQMNSLRPEDTAVYYCAKGRHSGSYYHWDDYWGQGTQVTVSS

SEQ ID NO: 488 - protein, 122 aa, synthetic construct
EVQLLESGGGLAQPGGSLRLSCAASGFTFSNYAMSWARQAPGKGLEWVSGIYSDGSGTYYADSVKGRFTISRDNAKNTVYLQMNSLRPEDTAVYYCANGRHSGSYYPWDDYWGQGTQVTVSS

SEQ ID NO: 489 - protein, 122 aa, synthetic construct
EVQLLESGGGLAQPGGSLRLSCAASGFTFSYYAMSWVRQAPGKGLEWVSGIYSDGSGTYYADSVKGRFTISRDNAKNTVYLQMNSLRPEDTAVYYCAKGRHSGSYDPWDDYWGQGTQVTVSS

SEQ ID NO: 490 - protein, 122 aa, synthetic construct
EVQLLESGGGLAQPGGSLRLSCAASGFTFSYYAMSWVRQAPGKGLEWVSGIYSDGSGTYYADSVKGRFTISRDNAKNTVYLQMNSLRPEDTAVYYCAKGRHSGSDYPWDDYWGQGTQVTVSS

SEQ ID NO: 491 - protein, 122 aa, synthetic construct
EVQLLESGGGLAQPGGSLRLSCAASGFTFSNYAMSWARQAPGKGLEWVSGIYSDGSGTYYADSVKGRFTISRDNAKNTVYLQMNSLRPEDTAVYYCAKGRNNGSYYPWDDYRGQGTQVTVSS

SEQ ID NO: 492 - protein, 122 aa, synthetic construct
EVQLLESGGGLVQPGGSLRLSCAASGFTFSNYAMSWARQAPGKGLEWVSGIYSDGSGTYYADSVKGRFTISRDNAKNTVYLQMNSLRPEDTAVYYCAKGRGSGSYYPWDGYWGQGTQVTVSS

SEQ ID NO: 493 - protein, 122 aa, synthetic construct
EVQLLESGGGLAQPGGSLRLSCAASGFTFSSYAMSWVRQAPGKGLEWVSGIYSDGSGTYYADSVKGRFTISRDNAKNTVYLQMNSLRPEDTAVYYCAKGRHSGSYYPLDEYWGQGTQVTVSS

SEQ ID NO: 494 - protein, 122 aa, synthetic construct
EVQLLESGGGLAQPGGSLRLSCAASGFTFSNYAMSWARQAPGKGLEWVSGIYSDGSGTYYADSVKGRFTISRDNAKNTVYLQMNSLRPEDTAVYYCAKGRGSGSYFPWDDYWGQGTQVTVSS

SEQ ID NO: 495 - protein, 122 aa, synthetic construct
EVQLLESGGGLAQPGGSLRLSCAASGFTFSSYAMSWVRQAPGKGLEWVSGIYSDGSGTYYADSVKGRFTISRDNAKNTVYLQMNSLRPEDTAVYYCAKGRHSGSYYHWDEYWGQGTQVTVSS

SEQ ID NO: 496 - protein, 122 aa, synthetic construct
EVQLLESGGGLAQPGGSLRLSCAASGFTFSSYAMSWVRQAPGKGLEWVSGIYSDGSGTYYADSVKGRFTISRDNAKNTVYLQMNSLRPEDTAVYYCAKGRHSGSYYPWDESWGQGTQVTVSS

SEQ ID NO: 497 - protein, 122 aa, synthetic construct
EVQLLESGGGLAQPGGSLRLSCAASGFTFSNYAMSWVRQAPGKGLEWVSGIYSDGSGTYYADSVKGRFTISRDNAKNTVYLQMNSLRPEDTAVYYCAKGRHSGSYYHWDEYWGQGTQVTVSS

SEQ ID NO: 498 - protein, 122 aa, synthetic construct
EVQLLESGGGLAQPGGSLRLSCAASGFTFSSYAMSWVRQAPGKGLEWVSGIYSDGSGTYYADSVKGRFTISRDNAKNTVYLQMNSLRPEDTAVYYCAKGMHSGSYYPWDEYWGQGTQVTVSS

SEQ ID NO: 499 - protein, 122 aa, synthetic construct
EVQLLESGGGLAQPGGSLRLSCAASGFTFSNYAMSWVRQAPGKGLEWVSGIYSDGSGTYYADSVKGRFTISRDNAKNTVYLQMNSLRPEDTAVYYCAKGRHRGSYYPWDEYWGQGTQVTVSS

SEQ ID NO: 500 - protein, 122 aa, synthetic construct
EVQLLESGGGLAQPGGSLRLSCAASGFTFSNYAMSWARQAPGKGLEWVSGIYSDGSGTYYADSVKGRFTISRDNAKNTVYLQMNSLRPEDTAVYYCAKGRNIGSYYPWDDYWGQGTQVTVSS

SEQ ID NO: 501 - protein, 122 aa, synthetic construct
EVQLLESGGGLAQPGGSLRLSCAASGFTFSNYAMSWVRQAPGKGLEWVSGIYSDGSGTYYADSVKGRFTISRDNAKNTVYLQMNSLRPEDTAVYYCAKGRNSVSYYPWDDYWGQGTQVTVSS

SEQ ID NO: 502 - protein, 122 aa, synthetic construct
EVQLLESGGGLAQPGGSLRLSCAASGFTFSNYAMSWVRQAPGKGLEWVSGIYSDGSGTYYADSVKGRFTISRDNAKNTVYLQMNSLRPEDTAVYYCAKWRHSGSYYPWDEYWGQGTQVTVSS

SEQ ID NO: 503 - protein, 122 aa, synthetic construct
EVQLLESGGGLAQPGGSLRLSCAASGFTFSNYAMSWVRQAPGKGLEWVSGIYSDGSGTYYADSVKGRFTISRDNAKNTVYLQMNSLRPEDTAVYYCAKGRHSGSYYPWDESWGQGTQVTVSS

SEQ ID NO: 504 - protein, 122 aa, synthetic construct
EVQLLESGGGLAQPGGSLRLSCAASGFTFSNYAMSWVRQAPGKGLEWVSGIYSDGSGTYYADSVKGRFTISRDNAKNTVYLQMNSLRPEDTAVYYCAKGRHSGRYYPWDEYWGQGTQVTVSS

SEQ ID NO: 505 - protein, 122 aa, synthetic construct
EVQLLESGGGLAQPGGSLRLSCAASGFTFSSYAMSWVRQAPGKGLEWVSGIYSDGSGTYYADSVKGRFTISRDNAKNTVYLQMNSLRPEDTAVYYCAKGRHSGSYYPGDEYWGQGTQVTVSS

SEQ ID NO: 506 - protein, 122 aa, synthetic construct
EVQLLESGGGLAQPGGSLRLSCAASGFTFSNYAMSWVRQAPGKGLEWVSGIYSDGSGTYYADSVKGRFTISRDNAKNTVYLQMNSLRPEDTAVYYCAKGRHSGSSYPWDEYWGQGTQVTVSS

SEQ ID NO: 507 - protein, 122 aa, synthetic construct
EVQLLESGGGLAQPGGSLRLSCAASGFTFSSYAMSWVRQAPGKGLEWVSGIYSDGSGTYYADSVKGRFTISRDNAKNTVYLQMNSLRPEDTAVYYCAKWRHSGSYYPWDEYWGQGTQVTVSS

SEQ ID NO: 508 - protein, 122 aa, synthetic construct
EVQLLESGGGLAQPGGSLRLSCAASGFTFSNYAMSWARQAPGKGLEWVSGIYSDGSGTYYADSVKGRFTISRDNAKNTVYLQMNSLRPEDTAVYYCAKGRNSGSSYPWDDYWGQGTQVTVSS

SEQ ID NO: 509 - protein, 122 aa, synthetic construct
EVQLLESGGGLAQPGGSLRLSCAASGFTFSSYAMSWVRQAPGKGLEWVSGIYSDGSGTYYADSVKGRFTISRDNAKNTVYLQMNSLRPEDTAVYYCAKGRHSGSSYPWDEYWGQGTQVTVSS

SEQ ID NO: 510 - protein, 122 aa, synthetic construct
EVQLLESGGGLAQPGGSLRLSCAASGFTFSNYAMSWVRQAPGKGLEWVSGIYSDGSGTYYADSVKGRFTISRDNAKNTVYLQMNSLRPEDTAVYYCAKGRNRGSYYPWDDYWGQGTQVTVSS

SEQ ID NO: 511 - protein, 122 aa, synthetic construct
EVQLLESGGGLAQPGGSLRLSCAASGFTFSNYAMSWVRQAPGKGLEWVSGIYSDGSGTYYADSVKGRFTISRDNAKNTVYLQMNSLRPEDTAVYYCAKGRHSGGYYPWDEYWGQGTQVTVSS

SEQ ID NO: 512 - protein, 122 aa, synthetic construct
EVQLLESGGGLAQPGGSLRLSCAASGFTFSNYAMSWARQAPGKGLEWVSGIYSDGSGTYYADSVKGRFTISRDNAKNTVYLQMNSLRPEDTAVYYCAKGRGSGSYYPWGDYWGQGTQVTVSS

SEQ ID NO: 513 - protein, 123 aa, synthetic construct
EVQLLESGGGLVQPGGSLRLSCAASGRTFSSYGMGWFRQAPGKEREFVAAISQSGGRTRYADSVKGRFTISRDNAKNTVYLQMNSLRPEDTAVYYCAATNFLIATTISAYDYWGQGTQVTVSS

SEQ ID NO: 514 - protein, 123 aa, synthetic construct
EVQLLESGGGLVQPGGSLRVSCAASGRTFSWYGMGWFRQAPGKEREFVAAISQSGGRTRYADSVKGRFTISRDNAKNTVYLQMNSLRPEDTAVYYCAASNFLIATTISAYDYWGQGTQVTVSS

SEQ ID NO: 515 - protein, 123 aa, synthetic construct
EVQLLESGGGLVQPGGSLRVSCAASGRTLSGYGMGWFRQAPGKEREFVAAISQSGGRTRYADSVKGRFTISRDNAKNTVYLQMNSLRPEDTAVYYCAASNFLLATTNSAYDYWGQGTQVTVSS

SEQ ID NO: 516 - protein, 123 aa, synthetic construct
EVQLLESGGGLVQPGGSLRLSCAASGRTFASFGMGWFRQAPGKEREFVAAISRGGGRTRYADSVKGRFTISRDDAKNTVYLQMNSLRPEDTAVYYCAASYFLLATTISGYDYWGQGTQVTVSS

SEQ ID NO: 517 - protein, 123 aa, synthetic construct
EVQLLESGGGLVQPGGSLRLSCAASGRTFASFGMGWFRQAPGKEREFVAAISRSGGRTRYADSVKGRFTISRDDAKNTVYLQMNSLRPEDTAVYYCAASYFLLATTISGYDFWGQGTQVTVSS

SEQ ID NO: 518 - protein, 123 aa, synthetic construct
EVQLLESGGGLVQPGGSLRLSCAASGRTFSSYGMGWFRQAPGKEREFVVAISGSGGRTRYADSVKGRFTISRDNAKNTVYLQMNSLRPEDTAVYYCAASDFLIATSISAYDYWGQGTQVTVSS

SEQ ID NO: 519 - protein, 123 aa, synthetic construct
EVQLLESGGGLVQPGGSLRLSCAASGRTFASFGMGWFRQAPGKEREFVAAISQGGGRTRYADSVKGRFTISRDDAKNTVYLQMNSLRPEDTAVYYCAASYFLLATTISGYDYWGQGTQVTVSS

SEQ ID NO: 520 - protein, 123 aa, synthetic construct
EVQLLESGGGLVQPGGSLRLSCAASGRTFSSYGMGWFRQAPGKEREFVVAVSGGGGRTRYADSVKGRFTISRDNAKNTVYLQMNSLRPEDTAVYYCAASDFLIATSISAYDYWGQGTQVTVSS

SEQ ID NO: 521 - protein, 123 aa, synthetic construct
EVQLLESGGGLVQPGGSLRVSCAASGRTFSWYGMGWFRQAPGKEREFVAAISRSGGRTRYADSVKGRFTISRDNAKNTVYLQMNSLRPEDTAVYYCAASNFLIATTISAYDYWGQGTQVTVSS

SEQ ID NO: 522 - protein, 123 aa, synthetic construct
EVQLLESGGGLVQPGGSLRVSCAASGRTFSWYGMGWFRQAPGKERVFVAAISHSGGRTRYADSVKGRFTISRDNAKNTVYLQMNSLRPEDTAVYYCAASNFLIATTISAYDYWGQGTQVTVSS

SEQ ID NO: 523 - protein, 123 aa, synthetic construct
EVQLLESGGGLVQPGGSLRLSCAASGRTFSSYGMGWFRQAPGKEREFVAAISQSGGRTRYADSVKGRFTISRDNAKNTVYLQMNSLRPEDTAVYYCAATNFLRATTISAYDYWGQGTQVTVSS

SEQ ID NO: 524 - protein, 123 aa, synthetic construct
EVQLLESGGGLVQPGGSLRLSCAASGRTFSSYGMGWFRQAPGKEREFVAAISQSGGRTRYADSVKGRFTISRDNAKNTVYLQMNSLRPEDTAVYYCAATNFLMATTISAYDYWGQGTQVTVSS

SEQ ID NO: 525 - protein, 123 aa, synthetic construct
EVQLLESGGGLVQPGGSLRLSCAASGRTFADFGMGWFRQAPGKEREFVAAISRSGGRTRYADSVKGRFTISRDDAKNTVYLQMNSLRPEDTAVYYCAASYFLLAITISGYDYWGQGTQVTVSS

SEQ ID NO: 526 - protein, 123 aa, synthetic construct
EVQLLESGGGLVQPGGSLRVSCAASGRTFSWNGMGWFRQAPGKEREFVAAISQSGGRPRYADSVKGRFTISRDNAKNTVYLQMNSLRPEDTAVYYCAASDFLLATTISAYDYWGQGTQVTVSS

SEQ ID NO: 527 - protein, 123 aa, synthetic construct
EVQLLESGGGLVQPGGSLRLSCAASGRTFSSYGMGWFRQAPGKEREFVAAISQSGGRTRYADSVKGRFTISRDNAKNTVYLQMNSLRPEDTAVYYCAATNFLIATTISAYDHWGQGTQVTVSS

SEQ ID NO: 528 - protein, 123 aa, synthetic construct
EVQLLESGGGLVQPGGSLRLSCAASGRTFASFGMGWFRQAPGKEREFVAGISQSGGRTRYADSVKGRFTISRDDAKNTVYLQMNSLRPEDTAVYYCAASYFLIANTISGYDYWGQGTQVTVSS

SEQ ID NO: 529 - protein, 123 aa, synthetic construct
EVQLLESGGGLVQPGGSLRLSCAASGRTFSSYGMGWFRQAPGKEREFVAAISQSGGRTRYADSVKGRFTISRDNAKNTVYLQMNSLRPEDTAVYYCAATNFLIAATISAYDYWGQGTQVTVSS

SEQ ID NO: 530 - protein, 123 aa, synthetic construct
EVQLLESGGGLAQPGGSLRLSCAASGRTFSSYGMGWFRQAPGKEREFVAAISQSGGRTRYADSVKGRFTISRDNAKNTVYLQMNSLRPEDTAVYYCAATNFLIATTISAYGYWGQGTQVTVSS

SEQ ID NO: 531 - protein, 123 aa, synthetic construct
EVQLLESGGGLVQPGGSLRLSCAASGRTFSSYGMGWFRQAPGKEREFVAAISQSGGRTRYADSVKGRFTISRDNAKNTVYLQMNSLRPEDTAVYYCAATNFLIATTMSAYDYWGQGTQVTVSS

SEQ ID NO: 532 - protein, 123 aa, synthetic construct
EVQLLESGGGLVQPGGSLRLSCAASGRTFSSYGVGWFRQAPGKEREFVAAISQSGGRTRYADSVKGRFTISRDNAKNTVYLQMNSLRPEDTAVYYCAATNFLIAATISAYDYWGQGTQVTVSS

SEQ ID NO: 533 - protein, 123 aa, synthetic construct
EVQLLESGGGLVQPGGSLRLSCAASGRTFSSYGMGWFRQAPGKEREFVAAISQSGGRTRYADSVKGRFTISRDNAKNTVYLQMNSLRPEDTAVYYCAATNLLIATTISAYDYWGQGTQVTVSS

SEQ ID NO: 534 - protein, 123 aa, synthetic construct
EVQLLESGGGLVQPGGSLRLSCAASGRTFSSYGMGWFRQAPGKEREFVAAISQSGGRTRYADSVKGRFTISRDNAKNTVYLQMNSLRPEDTAVYYCADTNFLIATTISAYDYWGQGTQVTVSS

SEQ ID NO: 535 - protein, 123 aa, synthetic construct
EVQLLESGGGLVQPGGSLRLSCAASGRTFSSYGMGWFRQAPGKEREFVAAISQSGGRTRYADSVKGRFTISRDNAKNTVYLQMNSLRPEDTAVYYCAATNSLIATTISAYDYWGQGTQVTVSS

SEQ ID NO: 536 - protein, 123 aa, synthetic construct
EVQLLESGGGLVQPGGSLRVSCAASGRTLSGYGMGWFRQAPGKEREFVAAISQSGGRTRYADSVKGRFTISRDNAKNTVYLQMNSLRPEDTAVYYCAASIFLLATTNSAYDYWGQGTQVTVSS

SEQ ID NO: 537 - protein, 123 aa, synthetic construct
EVQLLESGGGLVQPGGSLRLSCAASGRTFSSYGMGWFRQAPGKEREFVAAISQSGGRTRYADSVKGRFTISRDNAKNTVYLQMNSLRPEDTAVYYCAATNFLIATTISAYDSWGQGTQVTVSS

SEQ ID NO: 538 - protein, 123 aa, synthetic construct
EVQLLESGGGLVQPGGSLRLSCAASGRTFSSYGMGWFRQAPGKEREFVAAISQSGGRTRYADSVKGRFTISRDNAKNTVYLQMNSLRPEDTAVYYCAATNFLIAITISAYDYWGQGTQVTVSS

SEQ ID NO: 539 - protein, 123 aa, synthetic construct
EVQLLESGGGLVQPGGSLRLSCAASGRTFSSYGMGWFRQAPGKEREFVAAISQSGGRTRYADSVKGRFTISRDNAKNTVYLQMNSLRPEDTAVYYCAATKFLIATTISAYDYWGQGTQVTVSS

SEQ ID NO: 540 - protein, 123 aa, synthetic construct
EVQLLESGGGLVQPGGSLRLSCAASGRTFSSYGMGWFRQAPGKEREFVAAISQSGGRTRYADSVKGRFTISRDNAKNTVYLQMNSLRPEDTAVYYCTATNFLIATTISAYDYWGQGTQVTVSS

SEQ ID NO: 541 - protein, 123 aa, synthetic construct
EVQLLESGGGLVQPGGSLRLSCAASGRTFSSYGMGWFRQAPGKEREFVAAISQSGGRTRYADSVKGRFTISRDNVKNTVYLQMNSLRPEDTAVYYCAATNFLIATTISAHDYWGQGTQVTVSS

SEQ ID NO: 542 - protein, 123 aa, synthetic construct
EVQLLESGGGLVQPGGSLRLSCAASGRTFSSYGMGWFRQAPGKEREFVAAISQSGGRTRYADSVKGRFTISRDNAKNTVYLQMNSLRPEDTAVYYCAATNVLIATTISAYDYWGQGTQVTVSS

SEQ ID NO: 543 - protein, 123 aa, synthetic construct
EVQLLESGGGLVQPGGSLRLSCAASGRTFSSYGMGWFRQAPGKEREFVAAISQSGGRTRYADSVKGRFTISRDNAKNTVYLQMNSLRPEDTAVYYCAATNFPIATTISAYDYWGQGTQVTVSS

SEQ ID NO: 544 - protein, 123 aa, synthetic construct
EVQLLESGGGLVQPGGSLRLSCAASGRTFSSYGMGWFRQAPGKEREFVAAISQSGGRTRYADSVKGRFTISRDNAKNTVYLQMNSLRPEDTAVYYCAATNFLIATAISAYDYWGQGTQVTVSS

SEQ ID NO: 545 - protein, 123 aa, synthetic construct
EVQLLESGGGLVQPGGSLRVSCAASGRTFSWNGMGWFRQAPGKEREFVAAISQGGGRTRYADSVKGRFTISRDNAKNTVYLQMNSLRPEDTAVYYCAASDFLLATTISAYDYWGQGTQVTVSS

SEQ ID NO: 546 - protein, 123 aa, synthetic construct
EVQLLESGGGLVQPGGSLRLSCAASGRTFSSYGMGWFRQAPGKEREFVVAISGGGGRTRYADSVKGRFTISRDNAKNTVYLQMNSLRPEDTAVYYCAASDFLIATTISAYDYWGQGTQVTVSS

SEQ ID NO: 547 - protein, 123 aa, synthetic construct
EVQLLESGGGLVQPGGSLRLSCAASGRTFSSYGMGWFRQAPGKEREFVAAISQSGGRTRYADSVKGRFTISRDNAKNTVYLQMNSLRPEDTAVYYCAATNFLIATTISAYDDWGQGTQVTVSS

SEQ ID NO: 548 - protein, 123 aa, synthetic construct
EVQLLESGGGLVQPGGSLRLSCAASGRTFSSYGMGWFRQAPGKEREFVAAISQSGGRTRYADSVKGRFTISRDNAKNTVYLQMNSLRPEDTAVYYCAATNFLLATTISAYDYWGQGTQVTVSS

SEQ ID NO: 549 - protein, 123 aa, synthetic construct
EVQLLESGGGLVQPGGSLRLSCAASGRTFSSYGMGWFRQAPGKEREFVVAISGGGGRTRYADSVKGRFTISRDNAKSTVYLQMNSLRPEDTAVYYCAASDFLIATTLSAYDYWGQGTQVTVSS

SEQ ID NO: 550 - protein, 123 aa, synthetic construct
EVQLLESGGGLVQPGGSLRLSCAASGRTFSSYGMGWFRQAPGKEREFVAAISQSGGRTRYADSVKGRFTISRDNAKNTVYLQMNSLRPEDTAVYYCAATNFLIATTISAYDFWGQGTQVTVSS

SEQ ID NO: 551 - protein, 123 aa, synthetic construct
EVQLLESGGGLVQPGGSLRVSCAASGRTLSGYGMGWFRQAPGKEREFVAAISQSGGRTRYADSVKGRFTISRDNAKYTVYLQMNSLRPEDTAVYYCAASNFLLATTNSAYDYWGQGTQVTVSS

SEQ ID NO: 552 - protein, 123 aa, synthetic construct
EVQLLESGGGLVQPGGSLRLSCAASGRTFSSYGMGWFRQAPGKEREFVAAISQSGGRTRYADSVKGRFTISRDNAKNTVYLQMNSLRPEDTAVYYCAATNFRIATTISAYDYWGQGTQVTVSS

SEQ ID NO: 553 - protein, 123 aa, synthetic construct
EVQLLESGGGLVQPGGSLRLSCAASGRTFSSYGMGWFRQAPGKEREFVAAISQSGGRTRYADSVKGRFTISRDNAKNTVYLQMNSLRPEDTAVYYCAVTNFLIATTISAYDYWGQGTQVTVSS

SEQ ID NO: 554 - protein, 123 aa, synthetic construct
EVQLLESGGGLVQPGGSLRLSCAASGRTFSNYGMGWFRQAPGKEREFVVAISSSGGRTRYADSVKGRFTISRDNAKNTVYLQMNSLRPEDTAVYYCAASDFPIAATISAYDYWGQGTQVTVSS

SEQ ID NO: 555 - protein, 123 aa, synthetic construct
EVQLLESGGGLVQPGGSLRLSCAASGRTFSSYGMGWFRQAPGKEREFVAAISQSGGRTRYADSVKGRFTISRDNAKNTVYLQMNSLRPEDTAVYYCAATNFLIATTISTYDYWGQGTQVTVSS

SEQ ID NO: 556 - protein, 123 aa, synthetic construct
EVQLLESGGGLVQPGGSLRPSCAASGRTFSSYGMGWFRQAPGKEREFVAAISQSGGRTRYADSVKGRFTISRDNAKNTVYLQMNSLRPEDTAVYYCAATNFPIATTISAYDYWGQGTQVTVSS

SEQ ID NO: 557 - protein, 123 aa, synthetic construct
EVQLLESGGGLVQPGGSLRLSCAASGRTFSSYGMGWFRQAPGKEREFVAAISQSGGRTRYADSVKGRFTISRDNAKNTVYLQMNSLRPEDTAVYYCAATNFLIATTIFAYDYWGQGTQVTVSS

SEQ ID NO: 558 - protein, 123 aa, synthetic construct
EVQLLESGGGLVQPGGSLRVSCAASGRTFSWNGMGWFRQAPGKEREFVAAISQSGGRTRYADSVKGRFTISRDNTKNTVYLQMNSLRPEDTAVYYCAASDFLLATTTSAYDYWGQGTQVTVSS

SEQ ID NO: 559 - protein, 123 aa, synthetic construct
EVQLLESGGGLVQPGGSLRVSCAASEHTLSGYGMGWFRQAPGKEREFVAAISQSGGRTRYADSVKGRFTISRDNAKNTVYLQMNSLRPEDTAVYYCAASIFLLATTNSAYDYWGQGTQVTVSS

SEQ ID NO: 560 - protein, 123 aa, synthetic construct
EVQLLESGGGLVQPGGSLRLSCAASGRTFSSYGMGWFRQAPGKEREFVAAISQSGGRTRYADSVKGRFTISRDNAKNTVYLQMNSLRPEDTAVYYCAATIFLIATTISAYDYWGQGTQVTVSS

SEQ ID NO: 561 - protein, 123 aa, synthetic construct
EVQLLESGGGLVQPGGSLRLSCAASGRTFSSYGMGWFRQAPGKEREFVAAISQSGGRTRYADSVKGRFTISRDNAKNTVYLQMNSLRPEDTAVYYCAASNFLIATTISAYDYWGQGTQVTVSS

SEQ ID NO: 562 - protein, 123 aa, synthetic construct
EVQLLESGGGLVQPGGSLRLSCAASGRTFSSYGMGWFRQAPGKEREFVAAISQSGGRTRYADSVKGRFTISRDNAKNTVYLQMNSLRPEDTAVYYCAATNFLIETTISAYDYWGQGTQVTVSS

SEQ ID NO: 563 - protein, 123 aa, synthetic construct
EVQLLESGGGLVQPGGSLRLSCAASGRTFSSYGMGWFRQAPGKEREFVAAISQSGGRTRYADSVKGRFTISRDNAKNTVYLQMNSLRPEDTAVYYCAATNFLIATTISAYAYWGQGTQVTVSS

SEQ ID NO: 564 - protein, 123 aa, synthetic construct
EVQLLESGGGLVQPGGSLRLSCAASGRTFSSYGMGWFRQAPGKEREFVAAISQSGGRTRYADSVKGRFTISRDNAKNTVYLQMNSLRPEDTAVYYCAATYFLIATTISAYDYWGQGTQVTVSS

SEQ ID NO: 565 - protein, 123 aa, synthetic construct
EVQLLESGGGLVQPGGSLRLSCAASGRTFSSYGMGWFRQAPGKEREFVAAISQSGGRTRYADSVKGRFTISRDNAKNTVYLQMNSLRPEDTAVYYCAATNFLIATTISAFDYWGQGTQVTVSS

SEQ ID NO: 566 - protein, 123 aa, synthetic construct
EVQLLESGGGLVQPGGSLRLSCAASGRTFSSYGMGWFRQAPGKEREFVAAISQSGGRTRYADSVKGRFTISRDNAKNTVYLQMNSLRPEDTAVYYCAATNFLIATSISAYDYWGQGTQVTVSS

SEQ ID NO: 567 - protein, 123 aa, synthetic construct
EVQLLESGGGLVQPGGSLRLSCAASGRTFSSYGMGWFRQAPGKEREFVVAISGSGGRTRYADSVKGRFTISRDNAKNTVYLQMNSLRPEDTAVYYCAATDFLIATTISAYDYWGQGTQVTVSS

SEQ ID NO: 568 - protein, 123 aa, synthetic construct
EVQLLESGGGLVQPGGSLRLSCAASGRTFSSYGMGWFRQAPGKEREFVVAISGGGGRTRYADSVKGRFTISRDNAKNTVYLQMNSLRPEDTAVYYCAGSDFLMATTISAYDYWGQGTQVTVSS

SEQ ID NO: 569 - protein, 123 aa, synthetic construct
EVQLLESGGGLVQPGGSLRVSCAASGRTFSWYGMGWFRQAPGKGRVFVAAISHSGGRTRYADSVKGRFTISRDNAKNTVYLQMNSLRPEDTAVYYCAASDFLIATTVSAYDYWGQGTQVTVSS

SEQ ID NO: 570 - protein, 123 aa, synthetic construct
EVQLLESGGGLVQPGGSLRLSCAASGRTFSSYGMGWFRQAPGKEREFVVAISGGGGRTRYADSVKGRFTISRDNAKNTVYLQMNSLRPEDTAVYYCAASDFLIATTVSAYDYWGQGTQVTVSS

SEQ ID NO: 571 - protein, 123 aa, synthetic construct
EVQLLESGGGLVQPGGSLRLSCAASGRTFSSYGMGWFRQAPGKEREFVAAISQSGGRTRYADSVKGRFTISRDNAKNTVYLQMNSLRPEDTAVYYCAATNFLIATNISAYDYWGQGTQVTVSS

SEQ ID NO: 572 - protein, 123 aa, synthetic construct
EVQLLESGGGLVQPGGSLRLSCAASGRTFSSYGMGWFRQAPGKGREFVAAISQSGGRTRYADSVKGRFTISRDNAKNTVYLQMNSLRPEDTAVYYCAATDFLIATTISAYDYWGQGTQVTVSS

SEQ ID NO: 573 - protein, 123 aa, synthetic construct
EVQLLESGGGLVQPGGSLRLSCAASGRTFSSYGMGWFRQAPGKEREFVVAISGGGGRTRYADSVKGRFTISRDNAKNTVYLQMNSLRPEDTAVYYCAASDFSIATTISAYDYWGQGTQVTVSS

SEQ ID NO: 574 - protein, 123 aa, synthetic construct
EVQLLESGGGLVQPGGSLRVSCAASGRTFSWNGMGWFRQAPGKEREFVAAISQSGGRTRYADSVKGRFTISRDNAKNTVYLQMNSLRPEDTAVYYCAASDFLLATTMSAYVYWGQGTQVTVSS

SEQ ID NO: 575 - protein, 123 aa, synthetic construct
EVQLLESGGGLVQPGGSLRLSCAASGRTFTSFGMGWFRQAPGKEREFVAAISRSGGRTRYADSVKGRFTISRDDAKNTVYLQMNSLRPEDTAVYYCAASYFLLAITISGYDYWGQGTQVTVSS

SEQ ID NO: 576 - protein, 123 aa, synthetic construct
EVQLLESGGGLVQPGGSLRVSCAASGRTLSGYGMGWFRQAPGKEREFVAAISQSGGRTRYADSVKGRFTISRDNAKNTVYLQMNSLRPEDTAVYYCAASNFLLATTNSAYGYWGQGTQVTVSS

SEQ ID NO: 577 - protein, 123 aa, synthetic construct
EVQLLESGGGLVQPGGSLRVSCAASGRTFSRNGMGWFRQAPGKEREFVAAISQSGGRTRYADSVKGRFTISRDNAKNTVYLQMNSLRPEDTAVYYCAASDFLLATTISAYDYWGQGTQVTVSS

SEQ ID NO: 578 - protein, 123 aa, synthetic construct
EVQLLESGGGLVQPGGSPRVSCAASGRTFSWNGMGWFRQAPGKEREFVAAISQSGGRTRYADSVKGRFTISRDNAKNTVYLQMNSLRPEDTAVYYCAASDFLLATTISAYDYWGQGTQVTVSS

SEQ ID NO: 579 - protein, 123 aa, synthetic construct
EVQLLESGGGLVQPGGSLRLSCAASGRTFSSYGMGWFRQAPGKEREFVVAISGSGGRTRYADSVKGRFTISRDNAKNTVYLQMNSLRPEDTAVYYCAASDFFIATSISAYDYWGQGTQVTVSS

SEQ ID NO: 580 - protein, 123 aa, synthetic construct
EVQLLESGGGLVQPGGSLRLSCAASGRTFSSYGMGWFRQAPGKEREFVVAISGSGGRTRYADSVKGRFTISRDNAKNTVYLQMNSLRPEDTAVYYCAASYFLIATTLSAYDYWGQGTQVTVSS

SEQ ID NO: 581 - protein, 123 aa, synthetic construct
EVQLLESGGGLVQPGGSLRLSCAASGRTFSSYGMGWFRQAPGKEREFVAAISQSGGRTRYADSVKGRFTISRDNAKNTVYLQMNSLRPEDTAVYYCAATNFLIATTRSAYDYWGQGTQVTVSS

SEQ ID NO: 582 - protein, 123 aa, synthetic construct
EVQLLESGGGLVQPGGSLRLSCAASGRTFASFGMGWFRQAPGKEREFVAAISRSGGRTRYADSVKGRFTISRDDAKNTVYLQMNSLRPEDTAVYYCAASYFLLATTMSGYDFWGQGTQVTVSS

SEQ ID NO: 583 - protein, 123 aa, synthetic construct
EVQLLESGGGLVQPGGSLRLSCAASGRTFASFGMGWFRQAPGKEREFVAAISRSGGRTRYADSVKGRFTISRDDAKNTVYLQMNSLRPEDTAVYYCAASYFLLATTIFGYDFWGQGTQVTVSS

SEQ ID NO: 584 - protein, 123 aa, synthetic construct
EVQLLESGGGLVQPGGSLRVSCAASRRTLSGYGMGWFRQAPGKEREFVAAISQSGGRTRYADSVKGRFTISRDDAKNTVYLQMNSLRPEDTAVYYCAASNFLLATTNSAYDYWGQGTQVTVSS

SEQ ID NO: 585 - protein, 123 aa, synthetic construct
EVQLLESGGGLVQPGGSLRVSCAASGRTFSWNGMGWFRQAPGKEREFVAAISQSGGRTRYADSVKGRFTISRDNAKNTVYLQMNSLRPEDTAVYYCAASDSLLATTIPAYDYWGQGTQVTVSS

SEQ ID NO: 586 - protein, 123 aa, synthetic construct
EVQLLESGGGLVQPGGSLRLSCAASGRTFSSYGMGWFRQAPGKEREFVAAISQGGGRTRYADSVKGRFTISRDNAKNTVYLQMNSLRPEDTAVYYCAATNFLLATTISAYDYWGQGTQVTVSS

SEQ ID NO: 587 - protein, 123 aa, synthetic construct
EVQLLESGGGLVQPGGSLRLSCAASGRTFSSYGMGWFRQAPGKEREFVAAISQSGGRTRYADSVKGRFTISRDNAKNTVYLQMNSLRPEDTAVYYCAATNFLIATTISAYNYWGQGTQVTVSS

SEQ ID NO: 588 - protein, 123 aa, synthetic construct
EVQLLESGGGLVQPGGSLRLSCAASGRTFSSYGMGWFRQAPGKEREFVAAISQSGGRTRYADSVKGRFTISRDNAKNTVYLQMNSLRPEDTAVYYCAATNFQIATTISAYDYWGQGTQVTVSS

SEQ ID NO: 589 - protein, 123 aa, synthetic construct
EVQLLESGGGLVQPGGSLRLSCAASGRTFSSYGMGWFRQAPGKEREFVAAISQSGGRARYADSVKGRFTISRDNAKNTVYLQMNSLRPEDTAVYYCAATNFLIAATISAYDYWGQGTQVTVSS

SEQ ID NO: 590 - protein, 123 aa, synthetic construct
EVQLLESGGGLVQPGGSLRLSCAASGRTFSSYGMGWFRQAPGKEREFVAAISQSGGRTRYADSVKGRFTISRDNAKNTVYLQMNSLRPEDTAVYYCAATNFLIATTVSAYDYWGQGTQVTVSS

SEQ ID NO: 591 - protein, 123 aa, synthetic construct
EVQLLESGGGLVQPGGSLRLSCAASGRTFSSYGMGWFRQAPGKEREFVVAISGSGGRSRYADSVKGRFTISRDNAKNTVYLQMNSLRPEDTAVYYCAASYFLMATSISAYDYWGQGTQVTVSS

SEQ ID NO: 592 - protein, 123 aa, synthetic construct
EVQLLESGGGLVQPGGSLRLSCAASGRTFASFGMGWFRQAPGKEREFVAAISRSGGRTRYADSVKGRFTISRDDAKNTVYLQMNSLRPEDTAVYYCAASYFLLAATISGYDFWGQGTQVTVSS

SEQ ID NO: 593 - protein, 123 aa, synthetic construct
EVQLLESGGGLVQPGGSLRLSCAASGRTFASFGMGWFRQAPGKEREFVAAISRSGGRTRYADSVKGRFTISRDDAKNTVYLQMNSLRPEDTAVYYCAASYFLRATTISGYDFWGQGTQVTVSS

SEQ ID NO: 594 - protein, 123 aa, synthetic construct
EVQLLESGGGLVQPGGSLRLSCAASGRTFSSYGMGWFRQAPGKEREFVVAISGSGGRTRYADSVKGRFTISRDNAKNTVYLQMNSLRPEDTAVYYCAASDFLIATTISVYDYWGQGTQVTVSS

SEQ ID NO: 595 - protein, 123 aa, synthetic construct
EVQLLESGGGLVQPGGSLRLSCAASGRTFSSYGMGWFRQAPGKEREFVVAISGSGGRTRYADSVKGRFTISRDNAKNTVYLQMNSLRPEDTAVYYCAASYFLVATSISAYDYWGQGTQVTVSS

SEQ ID NO: 596 - protein, 123 aa, synthetic construct
EVQLLESGGGLVQPGGSLRLSCAASGRTFSSYGMGWFRQAPGKEREFVAAISQSGGRTRYADSVKGRFTISRDNAKNTVYLQMNSLRPEDTAVYYCAATNFLIATTIYAYDYWGQGTQVTVSS

SEQ ID NO: 597 - protein, 123 aa, synthetic construct
EVQLLESGGGLVQPGGSLRLSCAASGRTFSSYGMGWFRQAPGKEREFVVAISGSGGRTRYADSAKGRFTISRDNAKNTVYLQMNSLRPEDTAVYYCAASDFLIATTISAYDHWGQGTQVTVSS

SEQ ID NO: 598 - protein, 123 aa, synthetic construct
EVQLLESGGGLVQPGGSLRLSCAASGRTFSSYGMGWFRQAPGKEREFVVAISASGGRTRYADSVKGRFTISRDNAKNTVYLQMNSLRPEDTAVYYCAASYFLLATTMSAYDYWGQGTQVTVSS

SEQ ID NO: 599 - protein, 123 aa, synthetic construct
EVQLLESGGGLVQPGGSLRVSCAASGRTFSWYGMGWFRQAPGKEREFVAAISQSGGRTRYADSVKGRFTISRDNAKNTVYLQMNSLRPEDTAVYYCAASDFLLATTISAYDYWGQGTQVTVSS

SEQ ID NO: 600 - protein, 123 aa, synthetic construct
EVQLLESGGGLVQPGGSLRLSCAASGRTFASFGMGWFRQAPGKEREFVAAISRSGGRTRYADSVKGRFTISRDDAKNTVYLQMNSLRPEDTAVYYCAASYVLLATTISGYDFWGQGTQVTVSS

SEQ ID NO: 601 - protein, 123 aa, synthetic construct
EVQLLESGGGLVQPGGSLRLSCAASGRTFSSYGMGWFRQAPGKEREFVVAISGSGGRTRYADSVKGRFTISRDNAKNTVYLQMNSLRPEDTAVYYCAASYFLMATSISAYDYWGQGTQVTVSS

SEQ ID NO: 602 - protein, 123 aa, synthetic construct
EVQLLESGGGLVQPGGSLRLSCAASGRTFASFGMGWFRQAPGKEREFVAGISQSGGRTRYADSVKGRFTISRDDTKNTVYLQMNSLRPEDTAVYYCAASYFLIANTISGYDYWGQGTQVTVSS

SEQ ID NO: 603 - protein, 123 aa, synthetic construct
EVQLLESGGGLVQPGGSLRLSCAASGRTFTSFGMGWFRQAPGKEREFVAAISRSGGRTRYADSVKGRFTISRDDAKNTVYLQMNSLRPEDTAVYYCAASSFLLAITISGYDYWGQGTQVTVSS

SEQ ID NO: 604 - protein, 123 aa, synthetic construct
EVQLLESGGGLVQPGGSLRVSCAASGRTFSWNGMGWFRQAPGKEREFVAAISQSGGRTRYADSVKGRFTISRDNAKNTVYLQMNSLRPEDTAVYYCAASNFLLATTNSAYDYWGQGTQVTVSS

SEQ ID NO: 605 - protein, 123 aa, synthetic construct
EVQLLESGGGLVQPGGSLRLSCAASGRTFSSYGMGWFRQAPGKEREFVVAISGGGGRTRYADSVKGRFTISRDNAKNTVYLQMNSLRPEDTAVYYCAASDFLIATTIPAYDYWGQGTQVTVSS

SEQ ID NO: 606 - protein, 123 aa, synthetic construct
EVQLLESGGGLVQPGGSLRVSCAASGRTFSWNGMGWFRQAPGKEREFVAAISQSGGRTRYADSVKGRFTISRDNAKNTVYLQMNSLRPEDTAVYYCAASDFLLATTISGYDFWGQGTQVTVSS

SEQ ID NO: 607 - protein, 123 aa, synthetic construct
EVQLLESGGGLVQPGGSLRLSCAASGRTFSSYGMGWFRQAPGKEREFVAAISQSGGRTRYADSVKGRFTISRDNAKNTVYLQMNSLRPEDTAVYYCAATDFLIATTISAYDYWGQGTQVTVSS

SEQ ID NO: 608 - protein, 123 aa, synthetic construct
EVQLLESGGGLVQPGGSLRLSCAASGRTFSSYGMGWFRQAPGKEREFVAAISQSGGRTRYADSVKGRFTISRDNAKNTVYLQMNSLRPEDTAVYYCAATNFLIATTISEYDYWGQGTQVTVSS

SEQ ID NO: 609 - protein, 123 aa, synthetic construct
EVQLLESGGGLVQPGGSLRLSCAASGRTFSSYGMGWFRQAPGKEREFVAAISQSGGRTRYADSVKGRFTISRDNAKNTVYLQMNSLRPEDTAVYYCASTNFLIATTISAYDYWGQGTQVTVSS

SEQ ID NO: 610 - protein, 123 aa, synthetic construct
EVQLLESGGGLVQPGGSLRLSCAASGRTFSSYGMGWFRQAPGKEREFVAAISQSGGRTRYADSVKGRFTISRDNAKNTVYLQMNSLRPEDTAVYYCAATNFLIATTLSAYDYWGQGTQVTVSS

SEQ ID NO: 611 - protein, 123 aa, synthetic construct
EVQLLESGGGLVQPGGSLRLSCAASGRTFSSYGMGWFRQAPGKEREFVAAISQSGGRTRYADSVKGRFTISRDNAKNTVYLQMNSLRPEDTAVYYCAATNFLIATTISAYVYWGQGTQVTVSS

SEQ ID NO: 612 - protein, 123 aa, synthetic construct
EVQLLESGGGLVQPGGSLRLSCAASGRTFADFGMGWFRQAPGKEREFVAAISRSGGRTRYADSVKGRFTISRDDAKNTVYLQMNSLRPEDTAVYYCAASYFLLAITISAYDYWGQGTQVTVSS

SEQ ID NO: 613 - protein, 123 aa, synthetic construct
EVQLLESGGGLVQPGGSLRLSCAASGRTFASFGMGWFRQAPGKEREFVAAISRSGGRTRYADSVKGRFTISRDDAKNTVYLQMNSLRPEDTAVYYCAASYLLLATTISGYDFWGQGTQVTVSS

SEQ ID NO: 614 - protein, 123 aa, synthetic construct
EVQLLESGGGLVQPGGSLRLSCAASGRTFSSYGMGWFRQAPGKEREFVAAISQSGGRTRYADSVKGRFTISRDNAKNTVYLQMNSLRPEDTAVYYCAATNFLISTTISAYDYWGQGTQVTVSS

SEQ ID NO: 615 - protein, 123 aa, synthetic construct
EVQLLESGGGLVQPGGSLRVSCAASGRTFSWNGMGWFRQAPGKEREFVAAISQSGGRTRYADSVKGRFTISRDNAKNTVYLQMNSLRPEDTAVYYCAASDFLLATTMSAYGYWGQGTQVTVSS

SEQ ID NO: 616 - protein, 123 aa, synthetic construct
EVQLLESGGGLVQPGGSLRVSCAASGRTFSWNGMGWFRQAPGKEREFVAAISQSGGRTRYADSVKGRFTISRDNAKNTVYLQMNSLRPEDTAVYYCVASDFLLATTISAYDYWGQGTQVTVSS

SEQ ID NO: 617 - protein, 123 aa, synthetic construct
EVQLLESGGGLVQPGGSLRLSCAASGRTFASFGMGWFRQAPGKEREFVAAISRSGGRTRYADSVKGRFTISRDGAKNTVYLQMNSLRPEDTAVYYCAASYFLLATTISGYDFWGQGTQVTVSS

SEQ ID NO: 618 - protein, 123 aa, synthetic construct
EVQLLESGGGLVQPGGSLRLSCAASGRTFSNYGMGWFRQAPGKEREFVVAISSSGGRTRYADSVKGRFTISRDNAKNTVYLQMNSLRPEDTAVYYCAASDFLIATTISAYDYWGQGTQVTVSS

SEQ ID NO: 619 - protein, 123 aa, synthetic construct
EVQLLESGGGLVQPGGSLRLSCAASGRTFSSYGMGWFRQAPGKEREFVAAISQSGGRTRYADSVKGRFTISRDNAKNTVYLQMNSLRPEDTAVYYCAATNFLITTTISAYDYWGQGTQVTVSS

SEQ ID NO: 620 - protein, 123 aa, synthetic construct
EVQLLESGGGLVQPGGSLRLSCAASGRTFSSYGMGWFRQAPGKEREFVAAISQSGGRTRYADSVKGRFTISRDNAKNTVYLQMNSLRPEDTAVYYCAATNFLIATIISAYDYWGQGTQVTVSS

SEQ ID NO: 621 - protein, 123 aa, synthetic construct
EVQLLESGGGLVQPGGSLRLSCAASGRTFSSYGMGWFRQAPGKEREFVAAISQSGGRTRYADSVKGRFTISRDNAKNTVYLQMNSLRPEDTAVYYCAATSFLIATTISAYDYWGQGTQVTVSS

SEQ ID NO: 622 - protein, 123 aa, synthetic construct
EVQLLESGGGLVQPGGSLRLSCAASGRTFSSYGMGWFRQAPGKEREFVAAISQSGGRTRYADSVKGRFTISRDNAKNTVYLQMNSLRPEDTAVYYCAATNFLTATTISAYDYWGQGTQVTVSS

SEQ ID NO: 623 - protein, 123 aa, synthetic construct
EVQLLESGGGLVQPGGSLRLSCAASGRTFSSYNVGWFRQAPGKEREFVAAISQSGGRTRYADSVKGRFTISRDNAKNTVYLQMNSLRPEDTAVYYCATTNFLIATTISAYDYWGQGTQVTVSS

SEQ ID NO: 624 - protein, 123 aa, synthetic construct
EVQLLESGGGLVQPGGSLRLSCAASGRTFASFGMGWFRQAPGKEREFVAAISRSGGRTRYADSVKGRFTISRDDAKNTVYLQMNSLRPEDTAVYYCAASYFPLATTISGYDFWGQGTQVTVSS

SEQ ID NO: 625 - protein, 123 aa, synthetic construct
EVQLLESGGGLVQPGGSLRVSCAASGRTLSGYGMGWFRQAPGKEREFVAAISQSGGRTRYADSVKGRFTISRDNAKNTVYLQMNSLRPEDTAVYYCAASNFLLATANSAYDYWGQGTQVTVSS

SEQ ID NO: 626 - protein, 8 aa, synthetic construct
GRKFSTLI

SEQ ID NO: 627 - protein, 8 aa, synthetic construct
GRSFSTLI

SEQ ID NO: 628 - protein, 8 aa, synthetic construct
GRSFSTLI

SEQ ID NO: 629 - protein, 8 aa, synthetic construct
GRSFSTLI

SEQ ID NO: 630 - protein, 8 aa, synthetic construct
GRSFSTLI

SEQ ID NO: 631 - protein, 8 aa, synthetic construct
GRSFSTLI

SEQ ID NO: 632 - protein, 8 aa, synthetic construct
GRSFSTLI

SEQ ID NO: 633 - protein, 8 aa, synthetic construct
GMPFDRIS

SEQ ID NO: 634 - protein, 8 aa, synthetic construct
GMPFDRIS

SEQ ID NO: 635 - protein, 8 aa, synthetic construct
GRSFSTLI

SEQ ID NO: 636 - protein, 8 aa, synthetic construct
GRKFSTLI

SEQ ID NO: 637 - protein, 8 aa, synthetic construct
GRSFSTLI

SEQ ID NO: 638 - protein, 8 aa, synthetic construct
GRIFSSLI

SEQ ID NO: 639 - protein, 8 aa, synthetic construct
GRSFSTLI

SEQ ID NO: 640 - protein, 8 aa, synthetic construct
GRSFSTLI

SEQ ID NO: 641 - protein, 8 aa, synthetic construct
GRSFSTLI

SEQ ID NO: 642 - protein, 8 aa, synthetic construct
GRSFSTLI

SEQ ID NO: 643 - protein, 8 aa, synthetic construct
GRSFSTLI

SEQ ID NO: 644 - protein, 8 aa, synthetic construct
GRSFSTLI

SEQ ID NO: 645 - protein, 8 aa, synthetic construct
GRSFSTLI

SEQ ID NO: 646 - protein, 8 aa, synthetic construct
GRSFSTLI

SEQ ID NO: 647 - protein, 8 aa, synthetic construct
GRRFSTLI

SEQ ID NO: 648 - protein, 8 aa, synthetic construct
GRSFSTLI

SEQ ID NO: 649 - protein, 8 aa, synthetic construct
GRRFSTLI

SEQ ID NO: 650 - protein, 8 aa, synthetic construct
GRKFSTLI

SEQ ID NO: 651 - protein, 8 aa, synthetic construct
GRSFSTLI

SEQ ID NO: 652 - protein, 8 aa, synthetic construct
GRSFSTLI

SEQ ID NO: 653 - protein, 8 aa, synthetic construct
GRSFSTLI

SEQ ID NO: 654 - protein, 8 aa, synthetic construct
GRSFSTLI

SEQ ID NO: 655 - protein, 8 aa, synthetic construct
GRSFSTLI

SEQ ID NO: 656 - protein, 8 aa, synthetic construct
GRSFSTLI

SEQ ID NO: 657 - protein, 8 aa, synthetic construct
GRSFSTLI

SEQ ID NO: 658 - protein, 8 aa, synthetic construct
GRSFSTLI

SEQ ID NO: 659 - protein, 8 aa, synthetic construct
GRSFSTLI

SEQ ID NO: 660 - protein, 8 aa, synthetic construct
GRSFSTLI

SEQ ID NO: 661 - protein, 8 aa, synthetic construct
GRSFSTLI

SEQ ID NO: 662 - protein, 8 aa, synthetic construct
GRKFSTLI

SEQ ID NO: 663 - protein, 8 aa, synthetic construct
GRSFSTLI

SEQ ID NO: 664 - protein, 8 aa, synthetic construct
GRSFSTLI

SEQ ID NO: 665 - protein, 8 aa, synthetic construct
GRSFSTLI

SEQ ID NO: 666 - protein, 8 aa, synthetic construct
GRSFSTLI

SEQ ID NO: 667 - protein, 8 aa, synthetic construct
GRSFSTLI

SEQ ID NO: 668 - protein, 8 aa, synthetic construct
GRKFSTLI

SEQ ID NO: 669 - protein, 8 aa, synthetic construct
GRSFSTLI

SEQ ID NO: 670 - protein, 8 aa, synthetic construct
GRSFSTLI

SEQ ID NO: 671 - protein, 8 aa, synthetic construct
GRSFSTLI

SEQ ID NO: 672 - protein, 8 aa, synthetic construct
GRSFSTLI

SEQ ID NO: 673 - protein, 8 aa, synthetic construct
GRKFSTLI

SEQ ID NO: 674 - protein, 8 aa, synthetic construct
GRTFSTLI

SEQ ID NO: 675 - protein, 8 aa, synthetic construct
GRSFSTLI

SEQ ID NO: 676 - protein, 8 aa, synthetic construct
GRSFSTLI

SEQ ID NO: 677 - protein, 8 aa, synthetic construct
GRSFSTLI

SEQ ID NO: 678 - protein, 8 aa, synthetic construct
GRKFSTLI

SEQ ID NO: 679 - protein, 8 aa, synthetic construct
GRSFSTLI

SEQ ID NO: 680 - protein, 8 aa, synthetic construct
GRSFSTLI

SEQ ID NO: 681 - protein, 8 aa, synthetic construct
GRSFSTLI

SEQ ID NO: 682 - protein, 8 aa, synthetic construct
GRSFSTLI

SEQ ID NO: 683 - protein, 8 aa, synthetic construct
GRSFSTLI

SEQ ID NO: 684 - protein, 8 aa, synthetic construct
GRSFSTLI

SEQ ID NO: 685 - protein, 8 aa, synthetic construct
GRSFSTLI

SEQ ID NO: 686 - protein, 8 aa, synthetic construct
GRRFSTLI

SEQ ID NO: 687 - protein, 8 aa, synthetic construct
GRKFSTLI

SEQ ID NO: 688 - protein, 8 aa, synthetic construct
GRKFSTLI

SEQ ID NO: 689 - protein, 8 aa, synthetic construct
GRKFSTLI

SEQ ID NO: 690 - protein, 8 aa, synthetic construct
GRSFSTLI

SEQ ID NO: 691 - protein, 8 aa, synthetic construct
GRKFSTLI

SEQ ID NO: 692 - protein, 8 aa, synthetic construct
GFTFSSYA

SEQ ID NO: 693 - protein, 8 aa, synthetic construct
GFTFSSYA

SEQ ID NO: 694 - protein, 8 aa, synthetic construct
GFTFSYYA

SEQ ID NO: 695 - protein, 8 aa, synthetic construct
GFTFSNYA

SEQ ID NO: 696 - protein, 8 aa, synthetic construct
GFTFSNYA

SEQ ID NO: 697 - protein, 8 aa, synthetic construct
GFTFSNYA

SEQ ID NO: 698 - protein, 8 aa, synthetic construct
GFTFSNYA

SEQ ID NO: 699 - protein, 8 aa, synthetic construct
GFTFSNYA

SEQ ID NO: 700 - protein, 8 aa, synthetic construct
GFTFSNYA

SEQ ID NO: 701 - protein, 8 aa, synthetic construct
GFTFSNYA

SEQ ID NO: 702 - protein, 8 aa, synthetic construct
GFTFSNYA

SEQ ID NO: 703 - protein, 8 aa, synthetic construct
GFTFSSYA

SEQ ID NO: 704 - protein, 8 aa, synthetic construct
GFTFSNYA

SEQ ID NO: 705 - protein, 8 aa, synthetic construct
GFTFSNYA

SEQ ID NO: 706 - protein, 8 aa, synthetic construct
GFTFSNYA

SEQ ID NO: 707 - protein, 8 aa, synthetic construct
GFTFSNYA

SEQ ID NO: 708 - protein, 8 aa, synthetic construct
GFTFSSYA

SEQ ID NO: 709 - protein, 8 aa, synthetic construct
GFTFSNYA

SEQ ID NO: 710 - protein, 8 aa, synthetic construct
GFTFSSYA

SEQ ID NO: 711 - protein, 8 aa, synthetic construct
GFTFSNYA

SEQ ID NO: 712 - protein, 8 aa, synthetic construct
GFTFSNYA

SEQ ID NO: 713 - protein, 8 aa, synthetic construct
GFTFSSYA

SEQ ID NO: 714 - protein, 8 aa, synthetic construct
GFTFSNYA

SEQ ID NO: 715 - protein, 8 aa, synthetic construct
GFTFSNYA

SEQ ID NO: 716 - protein, 8 aa, synthetic construct
GFTFSNYA

SEQ ID NO: 717 - protein, 8 aa, synthetic construct
GFTFSNYA

SEQ ID NO: 718 - protein, 8 aa, synthetic construct
GFTFSNYA

SEQ ID NO: 719 - protein, 8 aa, synthetic construct
GFTFSNYA

SEQ ID NO: 720 - protein, 8 aa, synthetic construct
GFTFSNYA

SEQ ID NO: 721 - protein, 8 aa, synthetic construct
GFTFSSYA

SEQ ID NO: 722 - protein, 8 aa, synthetic construct
GFTFSNYA

SEQ ID NO: 723 - protein, 8 aa, synthetic construct
GFTFSSYA

SEQ ID NO: 724 - protein, 8 aa, synthetic construct
GFTFSNYA

SEQ ID NO: 725 - protein, 8 aa, synthetic construct
GFTFSNYA

SEQ ID NO: 726 - protein, 8 aa, synthetic construct
GFTFSSYA

SEQ ID NO: 727 - protein, 8 aa, synthetic construct
GFTFSNYA

SEQ ID NO: 728 - protein, 8 aa, synthetic construct
GFTFSNYA

SEQ ID NO: 729 - protein, 8 aa, synthetic construct
GFTFSNYA

SEQ ID NO: 730 - protein, 8 aa, synthetic construct
GFTFSSYA

SEQ ID NO: 731 - protein, 8 aa, synthetic construct
GFTFSNYA

SEQ ID NO: 732 - protein, 8 aa, synthetic construct
GFTFSSYA

SEQ ID NO: 733 - protein, 8 aa, synthetic construct
GFTFSNYA

SEQ ID NO: 734 - protein, 8 aa, synthetic construct
GFTFSNYA

SEQ ID NO: 735 - protein, 8 aa, synthetic construct
GFTFSNYA

SEQ ID NO: 736 - protein, 8 aa, synthetic construct
GFTFSNYA

SEQ ID NO: 737 - protein, 8 aa, synthetic construct
GFTFSSYA

SEQ ID NO: 738 - protein, 8 aa, synthetic construct
GFTFSSYA

SEQ ID NO: 739 - protein, 8 aa, synthetic construct
GFTFSNYA

SEQ ID NO: 740 - protein, 8 aa, synthetic construct
GFTFSNYA

SEQ ID NO: 741 - protein, 8 aa, synthetic construct
GFTFSNYA

SEQ ID NO: 742 - protein, 8 aa, synthetic construct
GFTFSNYA

SEQ ID NO: 743 - protein, 8 aa, synthetic construct
GFTFSNYA

SEQ ID NO: 744 - protein, 8 aa, synthetic construct
GFTFSNYA

SEQ ID NO: 745 - protein, 8 aa, synthetic construct
GFTFSNYA

SEQ ID NO: 746 - protein, 8 aa, synthetic construct
GFTFSNYA

SEQ ID NO: 747 - protein, 8 aa, synthetic construct
GFTFSSYA

SEQ ID NO: 748 - protein, 8 aa, synthetic construct
GFTFSNYA

SEQ ID NO: 749 - protein, 8 aa, synthetic construct
GFTFSNYA

SEQ ID NO: 750 - protein, 8 aa, synthetic construct
GFTFSSYA

SEQ ID NO: 751 - protein, 8 aa, synthetic construct
GFTFSSYA

SEQ ID NO: 752 - protein, 8 aa, synthetic construct
GFTFSSYA

SEQ ID NO: 753 - protein, 8 aa, synthetic construct
GFTFSNYA

SEQ ID NO: 754 - protein, 8 aa, synthetic construct
GFTFSNYA

SEQ ID NO: 755 - protein, 8 aa, synthetic construct
GFTFSNYA

SEQ ID NO: 756 - protein, 8 aa, synthetic construct
GFTFSNYA

SEQ ID NO: 757 - protein, 8 aa, synthetic construct
GFTFSNYA

SEQ ID NO: 758 - protein, 8 aa, synthetic construct
GFTFSNYA

SEQ ID NO: 759 - protein, 8 aa, synthetic construct
GFTFSNYA

SEQ ID NO: 760 - protein, 8 aa, synthetic construct
GFTFSNYA

SEQ ID NO: 761 - protein, 8 aa, synthetic construct
GFTFSNYA

SEQ ID NO: 762 - protein, 8 aa, synthetic construct
GFTFSSYA

SEQ ID NO: 763 - protein, 8 aa, synthetic construct
GFTFSNYA

SEQ ID NO: 764 - protein, 8 aa, synthetic construct
GFTFSYYA

SEQ ID NO: 765 - protein, 8 aa, synthetic construct
GFTFSNYA

SEQ ID NO: 766 - protein, 8 aa, synthetic construct
GFTFSYYA

SEQ ID NO: 767 - protein, 8 aa, synthetic construct
GFTFSNYA

SEQ ID NO: 768 - protein, 8 aa, synthetic construct
GFTFSYYA

SEQ ID NO: 769 - protein, 8 aa, synthetic construct
GFTFSNYA

SEQ ID NO: 770 - protein, 8 aa, synthetic construct
GFTFSYYA

SEQ ID NO: 771 - protein, 8 aa, synthetic construct
GFTFSNYA

SEQ ID NO: 772 - protein, 8 aa, synthetic construct
GFTFSNYA

SEQ ID NO: 773 - protein, 8 aa, synthetic construct
GFTFSNYA

SEQ ID NO: 774 - protein, 8 aa, synthetic construct
GFTFSNYA

SEQ ID NO: 775 - protein, 8 aa, synthetic construct
GFTFSNYA

SEQ ID NO: 776 - protein, 8 aa, synthetic construct
GFTFSYYA

SEQ ID NO: 777 - protein, 8 aa, synthetic construct
GFTFSYYA

SEQ ID NO: 778 - protein, 8 aa, synthetic construct
GFTFSYYA

SEQ ID NO: 779 - protein, 8 aa, synthetic construct
GFTFSNYA

SEQ ID NO: 780 - protein, 8 aa, synthetic construct
GFTFSYYA

SEQ ID NO: 781 - protein, 8 aa, synthetic construct
GFTFSYYA

SEQ ID NO: 782 - protein, 8 aa, synthetic construct
GFTFSNYA

SEQ ID NO: 783 - protein, 8 aa, synthetic construct
GFTFSSYA

SEQ ID NO: 784 - protein, 8 aa, synthetic construct
GFTFSNYA

SEQ ID NO: 785 - protein, 8 aa, synthetic construct
GFTFSSYA

SEQ ID NO: 786 - protein, 8 aa, synthetic construct
GFTFSNYA

SEQ ID NO: 787 - protein, 8 aa, synthetic construct
GFTFSSYA

SEQ ID NO: 788 - protein, 8 aa, synthetic construct
GFTFSSYA

SEQ ID NO: 789 - protein, 8 aa, synthetic construct
GFTFSNYA

SEQ ID NO: 790 - protein, 8 aa, synthetic construct
GFTFSSYA

SEQ ID NO: 791 - protein, 8 aa, synthetic construct
GFTFSNYA

SEQ ID NO: 792 - protein, 8 aa, synthetic construct
GFTFSNYA

SEQ ID NO: 793 - protein, 8 aa, synthetic construct
GFTFSNYA

SEQ ID NO: 794 - protein, 8 aa, synthetic construct
GFTFSNYA

SEQ ID NO: 795 - protein, 8 aa, synthetic construct
GFTFSNYA

SEQ ID NO: 796 - protein, 8 aa, synthetic construct
GFTFSNYA

SEQ ID NO: 797 - protein, 8 aa, synthetic construct
GFTFSSYA

SEQ ID NO: 798 - protein, 8 aa, synthetic construct
GFTFSNYA

SEQ ID NO: 799 - protein, 8 aa, synthetic construct
GFTFSSYA

SEQ ID NO: 800 - protein, 8 aa, synthetic construct
GFTFSNYA

SEQ ID NO: 801 - protein, 8 aa, synthetic construct
GFTFSSYA

SEQ ID NO: 802 - protein, 8 aa, synthetic construct
GFTFSNYA

SEQ ID NO: 803 - protein, 8 aa, synthetic construct
GFTFSNYA

SEQ ID NO: 804 - protein, 8 aa, synthetic construct
GFTFSNYA

SEQ ID NO: 805 - protein, 8 aa, synthetic construct
GRTFSSYG

SEQ ID NO: 806 - protein, 8 aa, synthetic construct
GRTFSWNG

SEQ ID NO: 807 - protein, 8 aa, synthetic construct
GRTFSWYG

SEQ ID NO: 808 - protein, 8 aa, synthetic construct
GRTLSGYG

SEQ ID NO: 809 - protein, 8 aa, synthetic construct
GRTFASFG

SEQ ID NO: 810 - protein, 8 aa, synthetic construct
GRTFASFG

SEQ ID NO: 811 - protein, 8 aa, synthetic construct
GRTFSSYG

SEQ ID NO: 812 - protein, 8 aa, synthetic construct
GRTFASFG

SEQ ID NO: 813 - protein, 8 aa, synthetic construct
GRTFSSYG

SEQ ID NO: 814 - protein, 8 aa, synthetic construct
GRTFSWYG

SEQ ID NO: 815 - protein, 8 aa, synthetic construct
GRTFSWYG

SEQ ID NO: 816 - protein, 8 aa, synthetic construct
GRTFSSYG

SEQ ID NO: 817 - protein, 8 aa, synthetic construct
GRTFSSYG

SEQ ID NO: 818 - protein, 8 aa, synthetic construct
GRTFADFG

SEQ ID NO: 819 - protein, 8 aa, synthetic construct
GRTFSWNG

SEQ ID NO: 820 - protein, 8 aa, synthetic construct
GRTFSSYG

SEQ ID NO: 821 - protein, 8 aa, synthetic construct
GRTFASFG

SEQ ID NO: 822 - protein, 8 aa, synthetic construct
GRTFSSYG

SEQ ID NO: 823 - protein, 8 aa, synthetic construct
GRTFSSYG

SEQ ID NO: 824 - protein, 8 aa, synthetic construct
GRTFSSYG

SEQ ID NO: 825 - protein, 8 aa, synthetic construct
GRTFSSYG

SEQ ID NO: 826 - protein, 8 aa, synthetic construct
GRTFSSYG

SEQ ID NO: 827 - protein, 8 aa, synthetic construct
GRTFSSYG

SEQ ID NO: 828 - protein, 8 aa, synthetic construct
GRTFSSYG

SEQ ID NO: 829 - protein, 8 aa, synthetic construct
GRTLSGYG

SEQ ID NO: 830 - protein, 8 aa, synthetic construct
GRTFSSYG

SEQ ID NO: 831 - protein, 8 aa, synthetic construct
GRTFSSYG

SEQ ID NO: 832 - protein, 8 aa, synthetic construct
GRTFSSYG

SEQ ID NO: 833 - protein, 8 aa, synthetic construct
GRTFSSYG

SEQ ID NO: 834 - protein, 8 aa, synthetic construct
GRTFSSYG

SEQ ID NO: 835 - protein, 8 aa, synthetic construct
GRTFSSYG

SEQ ID NO: 836 - protein, 8 aa, synthetic construct
GRTFASFG

SEQ ID NO: 837 - protein, 8 aa, synthetic construct
GRTFSSYG

SEQ ID NO: 838 - protein, 8 aa, synthetic construct
GRTFSSYG

SEQ ID NO: 839 - protein, 8 aa, synthetic construct
GRTFSWNG

SEQ ID NO: 840 - protein, 8 aa, synthetic construct
GRTFSSYG

SEQ ID NO: 841 - protein, 8 aa, synthetic construct
GRTFSSYG

SEQ ID NO: 842 - protein, 8 aa, synthetic construct
GRTFSSYG

SEQ ID NO: 843 - protein, 8 aa, synthetic construct
GRTFSSYG

SEQ ID NO: 844 - protein, 8 aa, synthetic construct
GRTFSSYG

SEQ ID NO: 845 - protein, 8 aa, synthetic construct
GRTFSSYG

SEQ ID NO: 846 - protein, 8 aa, synthetic construct
GRTLSGYG

SEQ ID NO: 847 - protein, 8 aa, synthetic construct
GRTFSSYG

SEQ ID NO: 848 - protein, 8 aa, synthetic construct
GRTFSSYG

SEQ ID NO: 849 - protein, 8 aa, synthetic construct
GRTFSNYG

SEQ ID NO: 850 - protein, 8 aa, synthetic construct
GRTFSSYG

SEQ ID NO: 851 - protein, 8 aa, synthetic construct
GRTFSSYG

SEQ ID NO: 852 - protein, 8 aa, synthetic construct
GRTFSSYG

SEQ ID NO: 853 - protein, 8 aa, synthetic construct
GRTLSGYG

SEQ ID NO: 854 - protein, 8 aa, synthetic construct
GRTFSWNG

SEQ ID NO: 855 - protein, 8 aa, synthetic construct
EHTLSGYG

SEQ ID NO: 856 - protein, 8 aa, synthetic construct
GRTFSSYG

SEQ ID NO: 857 - protein, 8 aa, synthetic construct
GRTFSSYG

SEQ ID NO: 858 - protein, 8 aa, synthetic construct
GRTFSSYG

SEQ ID NO: 859 - protein, 8 aa, synthetic construct
GRTFSSYG

SEQ ID NO: 860 - protein, 8 aa, synthetic construct
GRTFSSYG

SEQ ID NO: 861 - protein, 8 aa, synthetic construct
GRTFSSYG

SEQ ID NO: 862 - protein, 8 aa, synthetic construct
GRTFSSYG

SEQ ID NO: 863 - protein, 8 aa, synthetic construct
GRTFASFG

SEQ ID NO: 864 - protein, 8 aa, synthetic construct
GRTFSSYG

SEQ ID NO: 865 - protein, 8 aa, synthetic construct
GRTFSSYG

SEQ ID NO: 866 - protein, 8 aa, synthetic construct
GRTFSWYG

SEQ ID NO: 867 - protein, 8 aa, synthetic construct
GRTFSSYG

SEQ ID NO: 868 - protein, 8 aa, synthetic construct
GRTFSSYG

SEQ ID NO: 869 - protein, 8 aa, synthetic construct
GRTFSSYG

SEQ ID NO: 870 - protein, 8 aa, synthetic construct
GRTFSSYG

SEQ ID NO: 871 - protein, 8 aa, synthetic construct
GRTFSWNG

SEQ ID NO: 872 - protein, 8 aa, synthetic construct
GRTFTSFG

SEQ ID NO: 873 - protein, 8 aa, synthetic construct
GRTLSGYG

SEQ ID NO: 874 - protein, 8 aa, synthetic construct
GRTLSGYG

SEQ ID NO: 875 - protein, 8 aa, synthetic construct
GRTFSWNG

SEQ ID NO: 876 - protein, 8 aa, synthetic construct
GRTFSWNG

SEQ ID NO: 877 - protein, 8 aa, synthetic construct
GRTFSWNG

SEQ ID NO: 878 - protein, 8 aa, synthetic construct
GRTFSRNG

SEQ ID NO: 879 - protein, 8 aa, synthetic construct
GRTFSWNG

SEQ ID NO: 880 - protein, 8 aa, synthetic construct
GRTFSSYG

SEQ ID NO: 881 - protein, 8 aa, synthetic construct
GRTFSSYG

SEQ ID NO: 882 - protein, 8 aa, synthetic construct
GRTLSGYG

SEQ ID NO: 883 - protein, 8 aa, synthetic construct
GRTFSSYG

SEQ ID NO: 884 - protein, 8 aa, synthetic construct
GRTFSSYG

SEQ ID NO: 885 - protein, 8 aa, synthetic construct
GRTFASFG

SEQ ID NO: 886 - protein, 8 aa, synthetic construct
GRTFASFG

SEQ ID NO: 887 - protein, 8 aa, synthetic construct
RRTLSGYG

SEQ ID NO: 888 - protein, 8 aa, synthetic construct
GRTFSWNG

SEQ ID NO: 889 - protein, 8 aa, synthetic construct
GRTFSSYG

SEQ ID NO: 890 - protein, 8 aa, synthetic construct
GRTFSSYG

SEQ ID NO: 891 - protein, 8 aa, synthetic construct
GRTFSSYG

SEQ ID NO: 892 - protein, 8 aa, synthetic construct
GRTFSSYG

SEQ ID NO: 893 - protein, 8 aa, synthetic construct
GRTFSSYG

SEQ ID NO: 894 - protein, 8 aa, synthetic construct
GRTFSSYG

SEQ ID NO: 895 - protein, 8 aa, synthetic construct
GRTFASFG

SEQ ID NO: 896 - protein, 8 aa, synthetic construct
GRTFASFG

SEQ ID NO: 897 - protein, 8 aa, synthetic construct
GRTFSSYG

SEQ ID NO: 898 - protein, 8 aa, synthetic construct
GRTFSSYG

SEQ ID NO: 899 - protein, 8 aa, synthetic construct
GRTFSSYG

SEQ ID NO: 900 - protein, 8 aa, synthetic construct
GRTFSSYG

SEQ ID NO: 901 - protein, 8 aa, synthetic construct
GRTFSSYG

SEQ ID NO: 902 - protein, 8 aa, synthetic construct
GRTFSWYG

SEQ ID NO: 903 - protein, 8 aa, synthetic construct
GRTFASFG

SEQ ID NO: 904 - protein, 8 aa, synthetic construct
GRTFSSYG

SEQ ID NO: 905 - protein, 8 aa, synthetic construct
GRTFASFG

SEQ ID NO: 906 - protein, 8 aa, synthetic construct
GRTFTSFG

SEQ ID NO: 907 - protein, 8 aa, synthetic construct
GRTFSWNG

SEQ ID NO: 908 - protein, 8 aa, synthetic construct
GRTFSSYG

SEQ ID NO: 909 - protein, 8 aa, synthetic construct
GRTFSWNG

SEQ ID NO: 910 - protein, 8 aa, synthetic construct
GRTFSSYG

SEQ ID NO: 911 - protein, 8 aa, synthetic construct
GRTFSSYG

SEQ ID NO: 912 - protein, 8 aa, synthetic construct
GRTFSSYG

SEQ ID NO: 913 - protein, 8 aa, synthetic construct
GRTFSSYG

SEQ ID NO: 914 - protein, 8 aa, synthetic construct
GRTFSSYG

SEQ ID NO: 915 - protein, 8 aa, synthetic construct
GRTFADFG

SEQ ID NO: 916 - protein, 8 aa, synthetic construct
GRTFASFG

SEQ ID NO: 917 - protein, 8 aa, synthetic construct
GRTFSSYG

SEQ ID NO: 918 - protein, 8 aa, synthetic construct
GRTFSSYG

SEQ ID NO: 919 - protein, 8 aa, synthetic construct
GRTFSWNG

SEQ ID NO: 920 - protein, 8 aa, synthetic construct
GRTFSWNG

SEQ ID NO: 921 - protein, 8 aa, synthetic construct
GRTFASFG

SEQ ID NO: 922 - protein, 8 aa, synthetic construct
GRTFASFG

SEQ ID NO: 923 - protein, 8 aa, synthetic construct
GRTFSNYG

SEQ ID NO: 924 - protein, 8 aa, synthetic construct
GRTFSSYG

SEQ ID NO: 925 - protein, 8 aa, synthetic construct
GRTFSSYG

SEQ ID NO: 926 - protein, 8 aa, synthetic construct
GRTFSSYG

SEQ ID NO: 927 - protein, 8 aa, synthetic construct
GRTFSSYG

SEQ ID NO: 928 - protein, 8 aa, synthetic construct
GRTFSSYN

SEQ ID NO: 929 - protein, 8 aa, synthetic construct
GRTFASFG

SEQ ID NO: 930 - protein, 8 aa, synthetic construct
GRTLSGYG

SEQ ID NO: 931 - protein, 7 aa, synthetic construct
IERDGTT

SEQ ID NO: 932 - protein, 7 aa, synthetic construct
VDRDGTA

SEQ ID NO: 933 - protein, 7 aa, synthetic construct
VDRDGTA

SEQ ID NO: 934 - protein, 7 aa, synthetic construct
IERDGTT

SEQ ID NO: 935 - protein, 7 aa, synthetic construct
VDRDGTA

SEQ ID NO: 936 - protein, 7 aa, synthetic construct
IERDGTT

SEQ ID NO: 937 - protein, 7 aa, synthetic construct
IERDGTP

SEQ ID NO: 938 - protein, 7 aa, synthetic construct
ITALDDT

SEQ ID NO: 939 - protein, 7 aa, synthetic construct
ITMLDET

SEQ ID NO: 940 - protein, 7 aa, synthetic construct
VDRDGTA

SEQ ID NO: 941 - protein, 7 aa, synthetic construct
VDRDGTT

SEQ ID NO: 942 - protein, 7 aa, synthetic construct
IDRDGTT

SEQ ID NO: 943 - protein, 7 aa, synthetic construct
IGTSGNT

SEQ ID NO: 944 - protein, 7 aa, synthetic construct
IERDGTP

SEQ ID NO: 945 - protein, 7 aa, synthetic construct
IERGGTP

SEQ ID NO: 946 - protein, 7 aa, synthetic construct
IERGGTT

SEQ ID NO: 947 - protein, 7 aa, synthetic construct
IERDGTP

SEQ ID NO: 948 - protein, 7 aa, synthetic construct
INRDSTT

SEQ ID NO: 949 - protein, 7 aa, synthetic construct
IERDGTT

SEQ ID NO: 950 - protein, 7 aa, synthetic construct
IERDGTT

SEQ ID NO: 951 - protein, 7 aa, synthetic construct
IERGGTT

SEQ ID NO: 952 - protein, 7 aa, synthetic construct
AERDGTT

SEQ ID NO: 953 - protein, 7 aa, synthetic construct
IERDGTP

SEQ ID NO: 954 - protein, 7 aa, synthetic construct
AERDGTT

SEQ ID NO: 955 - protein, 7 aa, synthetic construct
IERDGTT

SEQ ID NO: 956 - protein, 7 aa, synthetic construct
IERDSTP

SEQ ID NO: 957 - protein, 7 aa, synthetic construct
IERDGTT

SEQ ID NO: 958 - protein, 7 aa, synthetic construct
IDRDGTA

SEQ ID NO: 959 - protein, 7 aa, synthetic construct
IDRGGTT

SEQ ID NO: 960 - protein, 7 aa, synthetic construct
IERDGTT

SEQ ID NO: 961 - protein, 7 aa, synthetic construct
IDRGGTT

SEQ ID NO: 962 - protein, 7 aa, synthetic construct
IERGGTT

SEQ ID NO: 963 - protein, 7 aa, synthetic construct
IERDGTT

SEQ ID NO: 964 - protein, 7 aa, synthetic construct
IERDGTP

SEQ ID NO: 965 - protein, 7 aa, synthetic construct
IERDGTP

SEQ ID NO: 966 - protein, 7 aa, synthetic construct
VDRDGTA

SEQ ID NO: 967 - protein, 7 aa, synthetic construct
VDRGGTT

SEQ ID NO: 968 - protein, 7 aa, synthetic construct
INRDGTT

SEQ ID NO: 969 - protein, 7 aa, synthetic construct
IERDGTP

SEQ ID NO: 970 - protein, 7 aa, synthetic construct
VDRDGTA

SEQ ID NO: 971 - protein, 7 aa, synthetic construct
IERGGTT

SEQ ID NO: 972 - protein, 7 aa, synthetic construct
VDRDGTA

SEQ ID NO: 973 - protein, 7 aa, synthetic construct
IERDGTT

SEQ ID NO: 974 - protein, 7 aa, synthetic construct
IERDGTT

SEQ ID NO: 975 - protein, 7 aa, synthetic construct
IERDGTT

SEQ ID NO: 976 - protein, 7 aa, synthetic construct
IERDGTT

SEQ ID NO: 977 - protein, 7 aa, synthetic construct
IERGGTA

SEQ ID NO: 978 - protein, 7 aa, synthetic construct
IERDGTT

SEQ ID NO: 979 - protein, 7 aa, synthetic construct
IERGGTT

SEQ ID NO: 980 - protein, 7 aa, synthetic construct
IERDGTT

SEQ ID NO: 981 - protein, 7 aa, synthetic construct
IERDGTP

SEQ ID NO: 982 - protein, 7 aa, synthetic construct
IDRDGTT

SEQ ID NO: 983 - protein, 7 aa, synthetic construct
IERDGTT

SEQ ID NO: 984 - protein, 7 aa, synthetic construct
IERDGTT

SEQ ID NO: 985 - protein, 7 aa, synthetic construct
IERDGTT

SEQ ID NO: 986 - protein, 7 aa, synthetic construct
IERDGTT

SEQ ID NO: 987 - protein, 7 aa, synthetic construct
IERDGTT

SEQ ID NO: 988 - protein, 7 aa, synthetic construct
IERDGTT

SEQ ID NO: 989 - protein, 7 aa, synthetic construct
IERDGTT

SEQ ID NO: 990 - protein, 7 aa, synthetic construct
IDRDGTT

SEQ ID NO: 991 - protein, 7 aa, synthetic construct
IERGGTP

SEQ ID NO: 992 - protein, 7 aa, synthetic construct
IERDDTT

SEQ ID NO: 993 - protein, 7 aa, synthetic construct
IERDDTT

SEQ ID NO: 994 - protein, 7 aa, synthetic construct
IDRDGTT

SEQ ID NO: 995 - protein, 7 aa, synthetic construct
IDRGGTT

SEQ ID NO: 996 - protein, 7 aa, synthetic construct
IDRDGTT

SEQ ID NO: 997 - protein, 8 aa, synthetic construct
IYSDGSGT

SEQ ID NO: 998 - protein, 8 aa, synthetic construct
IYSDGSGT

SEQ ID NO: 999 - protein, 8 aa, synthetic construct
IYSDGSGT

SEQ ID NO: 1000 - protein, 8 aa, synthetic construct
IYSDGSGT

SEQ ID NO: 1001 - protein, 8 aa, synthetic construct
IYSDGSGT

SEQ ID NO: 1002 - protein, 8 aa, synthetic construct
IYSDGSGT

SEQ ID NO: 1003 - protein, 8 aa, synthetic construct
IYSDGSGT

SEQ ID NO: 1004 - protein, 8 aa, synthetic construct
IYSDGSGT

SEQ ID NO: 1005 - protein, 8 aa, synthetic construct
IYSDGSGT

SEQ ID NO: 1006 - protein, 8 aa, synthetic construct
IYSDGSGT

SEQ ID NO: 1007 - protein, 8 aa, synthetic construct
IYSDGSGT

SEQ ID NO: 1008 - protein, 8 aa, synthetic construct
IYSDGSGT

SEQ ID NO: 1009 - protein, 8 aa, synthetic construct
IYSDGSDT

SEQ ID NO: 1010 - protein, 8 aa, synthetic construct
IYSDGSGT

SEQ ID NO: 1011 - protein, 8 aa, synthetic construct
IYSDGSGT

SEQ ID NO: 1012 - protein, 8 aa, synthetic construct
IYSDGSGT

SEQ ID NO: 1013 - protein, 8 aa, synthetic construct
IYSDGSGT

SEQ ID NO: 1014 - protein, 8 aa, synthetic construct
IYSDGSGT

SEQ ID NO: 1015 - protein, 8 aa, synthetic construct
IYSDGSGT

SEQ ID NO: 1016 - protein, 8 aa, synthetic construct
IYSDGSGT

SEQ ID NO: 1017 - protein, 8 aa, synthetic construct
IYSDGSGT

SEQ ID NO: 1018 - protein, 8 aa, synthetic construct
IYSDGSGT

SEQ ID NO: 1019 - protein, 8 aa, synthetic construct
IYSDGSGT

SEQ ID NO: 1020 - protein, 8 aa, synthetic construct
IYSDGSGT

SEQ ID NO: 1021 - protein, 8 aa, synthetic construct
IYSDGSGT

SEQ ID NO: 1022 - protein, 8 aa, synthetic construct
IYGDGSGT

SEQ ID NO: 1023 - protein, 8 aa, synthetic construct
IYSDGSGT

SEQ ID NO: 1024 - protein, 8 aa, synthetic construct
IYSDGSGT

SEQ ID NO: 1025 - protein, 8 aa, synthetic construct
IYSDGSGT

SEQ ID NO: 1026 - protein, 8 aa, synthetic construct
IYSDGSGT

SEQ ID NO: 1027 - protein, 8 aa, synthetic construct
IYSDGSGT

SEQ ID NO: 1028 - protein, 8 aa, synthetic construct
IYSDGSGT

SEQ ID NO: 1029 - protein, 8 aa, synthetic construct
IYSDGSGT

SEQ ID NO: 1030 - protein, 8 aa, synthetic construct
IYSDGSGT

SEQ ID NO: 1031 - protein, 8 aa, synthetic construct
IYSDGSGT

SEQ ID NO: 1032 - protein, 8 aa, synthetic construct
IYSDGSGT

SEQ ID NO: 1033 - protein, 8 aa, synthetic construct
IYGDGSGT

SEQ ID NO: 1034 - protein, 8 aa, synthetic construct
IYSDGSGT

SEQ ID NO: 1035 - protein, 8 aa, synthetic construct
IYSDGSGT

SEQ ID NO: 1036 - protein, 8 aa, synthetic construct
IYSDGSGT

SEQ ID NO: 1037 - protein, 8 aa, synthetic construct
IYSDGSGT

SEQ ID NO: 1038 - protein, 8 aa, synthetic construct
IYSDGSGT

SEQ ID NO: 1039 - protein, 8 aa, synthetic construct
IYSDGSGT

SEQ ID NO: 1040 - protein, 8 aa, synthetic construct
IYSDGSGT

SEQ ID NO: 1041 - protein, 8 aa, synthetic construct
IYSDGSGT

SEQ ID NO: 1042 - protein, 8 aa, synthetic construct
IYSDGSGT

SEQ ID NO: 1043 - protein, 8 aa, synthetic construct
IYSDGSGT

SEQ ID NO: 1044 - protein, 8 aa, synthetic construct
IYSDGSGT

SEQ ID NO: 1045 - protein, 8 aa, synthetic construct
IYSDGSGT

SEQ ID NO: 1046 - protein, 8 aa, synthetic construct
IYSDGSGT

SEQ ID NO: 1047 - protein, 8 aa, synthetic construct
IYSDGSGT

SEQ ID NO: 1048 - protein, 8 aa, synthetic construct
IYSDGSGT

SEQ ID NO: 1049 - protein, 8 aa, synthetic construct
IYSDGSGT

SEQ ID NO: 1050 - protein, 8 aa, synthetic construct
IYSDGSGT

SEQ ID NO: 1051 - protein, 8 aa, synthetic construct
IYSDGSGT

SEQ ID NO: 1052 - protein, 8 aa, synthetic construct
IYSDGSGT

SEQ ID NO: 1053 - protein, 8 aa, synthetic construct
IYSDGSGT

SEQ ID NO: 1054 - protein, 8 aa, synthetic construct
IYSDGSGT

SEQ ID NO: 1055 - protein, 8 aa, synthetic construct
IYSDGSGT

SEQ ID NO: 1056 - protein, 8 aa, synthetic construct
IYSDGSGT

SEQ ID NO: 1057 - protein, 8 aa, synthetic construct
IYSDGSGT

SEQ ID NO: 1058 - protein, 8 aa, synthetic construct
IYSDGSGT

SEQ ID NO: 1059 - protein, 8 aa, synthetic construct
IYSDGSGT

SEQ ID NO: 1060 - protein, 8 aa, synthetic construct
IYSDGSGT

SEQ ID NO: 1061 - protein, 8 aa, synthetic construct
IYGDGSGT

SEQ ID NO: 1062 - protein, 8 aa, synthetic construct
IYSDGSGT

SEQ ID NO: 1063 - protein, 8 aa, synthetic construct
IYSDGSGT

SEQ ID NO: 1064 - protein, 8 aa, synthetic construct
IYSDGSGT

SEQ ID NO: 1065 - protein, 8 aa, synthetic construct
IYSDGSGT

SEQ ID NO: 1066 - protein, 8 aa, synthetic construct
IYGDGSGT

SEQ ID NO: 1067 - protein, 8 aa, synthetic construct
IYSDGSGT

SEQ ID NO: 1068 - protein, 8 aa, synthetic construct
IYSDGSGT

SEQ ID NO: 1069 - protein, 8 aa, synthetic construct
IYSDGSGT

SEQ ID NO: 1070 - protein, 8 aa, synthetic construct
IYSDGSGT

SEQ ID NO: 1071 - protein, 8 aa, synthetic construct
IYSDGSGT

SEQ ID NO: 1072 - protein, 8 aa, synthetic construct
IYSDGSGT

SEQ ID NO: 1073 - protein, 8 aa, synthetic construct
IYSDGSGT

SEQ ID NO: 1074 - protein, 8 aa, synthetic construct
IYSDGSGT

SEQ ID NO: 1075 - protein, 8 aa, synthetic construct
IYSDGSGT

SEQ ID NO: 1076 - protein, 8 aa, synthetic construct
IYSDGSGT

SEQ ID NO: 1077 - protein, 8 aa, synthetic construct
IYSDGSGT

SEQ ID NO: 1078 - protein, 8 aa, synthetic construct
IYSDGSGT

SEQ ID NO: 1079 - protein, 8 aa, synthetic construct
IYSDGSGT

SEQ ID NO: 1080 - protein, 8 aa, synthetic construct
IYSDGSGT

SEQ ID NO: 1081 - protein, 8 aa, synthetic construct
IYSDGSGT

SEQ ID NO: 1082 - protein, 8 aa, synthetic construct
IYSDGSGT

SEQ ID NO: 1083 - protein, 8 aa, synthetic construct
IYSDGSGT

SEQ ID NO: 1084 - protein, 8 aa, synthetic construct
IYSDGSGT

SEQ ID NO: 1085 - protein, 8 aa, synthetic construct
IYSDGSGT

SEQ ID NO: 1086 - protein, 8 aa, synthetic construct
IYSDGSGT

SEQ ID NO: 1087 - protein, 8 aa, synthetic construct
IYSDGSGT

SEQ ID NO: 1088 - protein, 8 aa, synthetic construct
IYSDGSGT

SEQ ID NO: 1089 - protein, 8 aa, synthetic construct
IYSDGSGT

SEQ ID NO: 1090 - protein, 8 aa, synthetic construct
IYSDGSGT

SEQ ID NO: 1091 - protein, 8 aa, synthetic construct
IYSDGSGT

SEQ ID NO: 1092 - protein, 8 aa, synthetic construct
IYSDGSGT

SEQ ID NO: 1093 - protein, 8 aa, synthetic construct
IYSDGSGT

SEQ ID NO: 1094 - protein, 8 aa, synthetic construct
IYSDGSGT

SEQ ID NO: 1095 - protein, 8 aa, synthetic construct
IYSDGSGT

SEQ ID NO: 1096 - protein, 8 aa, synthetic construct
IYSDGSGT

SEQ ID NO: 1097 - protein, 8 aa, synthetic construct
IYSDGSGT

SEQ ID NO: 1098 - protein, 8 aa, synthetic construct
IYSDGSGT

SEQ ID NO: 1099 - protein, 8 aa, synthetic construct
IYSDGSGT

SEQ ID NO: 1100 - protein, 8 aa, synthetic construct
IYSDGSGT

SEQ ID NO: 1101 - protein, 8 aa, synthetic construct
IYSDGSGT

SEQ ID NO: 1102 - protein, 8 aa, synthetic construct
IYSDGSGT

SEQ ID NO: 1103 - protein, 8 aa, synthetic construct
IYSDGSGT

SEQ ID NO: 1104 - protein, 8 aa, synthetic construct
IYSDGSGT

SEQ ID NO: 1105 - protein, 8 aa, synthetic construct
IYSDGSGT

SEQ ID NO: 1106 - protein, 8 aa, synthetic construct
IYSDGSGT

SEQ ID NO: 1107 - protein, 8 aa, synthetic construct
IYSDGSGT

SEQ ID NO: 1108 - protein, 8 aa, synthetic construct
IYSDGSGT

SEQ ID NO: 1109 - protein, 8 aa, synthetic construct
IYSDGSGT

SEQ ID NO: 1110 - protein, 8 aa, synthetic construct
ISQSGGRT

SEQ ID NO: 1111 - protein, 8 aa, synthetic construct
ISQSGGRT

SEQ ID NO: 1112 - protein, 8 aa, synthetic construct
ISQSGGRT

SEQ ID NO: 1113 - protein, 8 aa, synthetic construct
ISQSGGRT

SEQ ID NO: 1114 - protein, 8 aa, synthetic construct
ISRGGGRT

SEQ ID NO: 1115 - protein, 8 aa, synthetic construct
ISRSGGRT

SEQ ID NO: 1116 - protein, 8 aa, synthetic construct
ISGSGGRT

SEQ ID NO: 1117 - protein, 8 aa, synthetic construct
ISQGGGRT

SEQ ID NO: 1118 - protein, 8 aa, synthetic construct
VSGGGGRT

SEQ ID NO: 1119 - protein, 8 aa, synthetic construct
ISRSGGRT

SEQ ID NO: 1120 - protein, 8 aa, synthetic construct
ISHSGGRT

SEQ ID NO: 1121 - protein, 8 aa, synthetic construct
ISQSGGRT

SEQ ID NO: 1122 - protein, 8 aa, synthetic construct
ISQSGGRT

SEQ ID NO: 1123 - protein, 8 aa, synthetic construct
ISRSGGRT

SEQ ID NO: 1124 - protein, 8 aa, synthetic construct
ISQSGGRP

SEQ ID NO: 1125 - protein, 8 aa, synthetic construct
ISQSGGRT

SEQ ID NO: 1126 - protein, 8 aa, synthetic construct
ISQSGGRT

SEQ ID NO: 1127 - protein, 8 aa, synthetic construct
ISQSGGRT

SEQ ID NO: 1128 - protein, 8 aa, synthetic construct
ISQSGGRT

SEQ ID NO: 1129 - protein, 8 aa, synthetic construct
ISQSGGRT

SEQ ID NO: 1130 - protein, 8 aa, synthetic construct
ISQSGGRT

SEQ ID NO: 1131 - protein, 8 aa, synthetic construct
ISQSGGRT

SEQ ID NO: 1132 - protein, 8 aa, synthetic construct
ISQSGGRT

SEQ ID NO: 1133 - protein, 8 aa, synthetic construct
ISQSGGRT

SEQ ID NO: 1134 - protein, 8 aa, synthetic construct
ISQSGGRT

SEQ ID NO: 1135 - protein, 8 aa, synthetic construct
ISQSGGRT

SEQ ID NO: 1136 - protein, 8 aa, synthetic construct
ISQSGGRT

SEQ ID NO: 1137 - protein, 8 aa, synthetic construct
ISQSGGRT

SEQ ID NO: 1138 - protein, 8 aa, synthetic construct
ISQSGGRT

SEQ ID NO: 1139 - protein, 8 aa, synthetic construct
ISQSGGRT

SEQ ID NO: 1140 - protein, 8 aa, synthetic construct
ISQSGGRT

SEQ ID NO: 1141 - protein, 8 aa, synthetic construct
ISQSGGRT

SEQ ID NO: 1142 - protein, 8 aa, synthetic construct
ISQSGGRT

SEQ ID NO: 1143 - protein, 8 aa, synthetic construct
ISQSGGRT

SEQ ID NO: 1144 - protein, 8 aa, synthetic construct
ISQGGGRT

SEQ ID NO: 1145 - protein, 8 aa, synthetic construct
ISGGGGRT

SEQ ID NO: 1146 - protein, 8 aa, synthetic construct
ISQSGGRT

SEQ ID NO: 1147 - protein, 8 aa, synthetic construct
ISQSGGRT

SEQ ID NO: 1148 - protein, 8 aa, synthetic construct
ISQSGGRT

SEQ ID NO: 1149 - protein, 8 aa, synthetic construct
ISGGGGRT

SEQ ID NO: 1150 - protein, 8 aa, synthetic construct
ISQSGGRT

SEQ ID NO: 1151 - protein, 8 aa, synthetic construct
ISQSGGRT

SEQ ID NO: 1152 - protein, 8 aa, synthetic construct
ISQSGGRT

SEQ ID NO: 1153 - protein, 8 aa, synthetic construct
ISQSGGRT

SEQ ID NO: 1154 - protein, 8 aa, synthetic construct
ISSSGGRT

SEQ ID NO: 1155 - protein, 8 aa, synthetic construct
ISQSGGRT

SEQ ID NO: 1156 - protein, 8 aa, synthetic construct
ISQSGGRT

SEQ ID NO: 1157 - protein, 8 aa, synthetic construct
ISQSGGRT

SEQ ID NO: 1158 - protein, 8 aa, synthetic construct
ISQSGGRT

SEQ ID NO: 1159 - protein, 8 aa, synthetic construct
ISQSGGRT

SEQ ID NO: 1160 - protein, 8 aa, synthetic construct
ISQSGGRT

SEQ ID NO: 1161 - protein, 8 aa, synthetic construct
ISQSGGRT

SEQ ID NO: 1162 - protein, 8 aa, synthetic construct
ISQSGGRT

SEQ ID NO: 1163 - protein, 8 aa, synthetic construct
ISQSGGRT

SEQ ID NO: 1164 - protein, 8 aa, synthetic construct
ISQSGGRT

SEQ ID NO: 1165 - protein, 8 aa, synthetic construct
ISQSGGRT

SEQ ID NO: 1166 - protein, 8 aa, synthetic construct
ISQSGGRT

SEQ ID NO: 1167 - protein, 8 aa, synthetic construct
ISQSGGRT

SEQ ID NO: 1168 - protein, 8 aa, synthetic construct
ISQSGGRT

SEQ ID NO: 1169 - protein, 8 aa, synthetic construct
ISGSGGRT

SEQ ID NO: 1170 - protein, 8 aa, synthetic construct
ISGGGGRT

SEQ ID NO: 1171 - protein, 8 aa, synthetic construct
ISHSGGRT

SEQ ID NO: 1172 - protein, 8 aa, synthetic construct
ISGGGGRT

SEQ ID NO: 1173 - protein, 8 aa, synthetic construct
ISQSGGRT

SEQ ID NO: 1174 - protein, 8 aa, synthetic construct
ISQSGGRT

SEQ ID NO: 1175 - protein, 8 aa, synthetic construct
ISGGGGRT

SEQ ID NO: 1176 - protein, 8 aa, synthetic construct
ISQSGGRT

SEQ ID NO: 1177 - protein, 8 aa, synthetic construct
ISRSGGRT

SEQ ID NO: 1178 - protein, 8 aa, synthetic construct
ISQSGGRT

SEQ ID NO: 1179 - protein, 8 aa, synthetic construct
ISQSGGRT

SEQ ID NO: 1180 - protein, 8 aa, synthetic construct
ISQSGGRT

SEQ ID NO: 1181 - protein, 8 aa, synthetic construct
ISQSGGRT

SEQ ID NO: 1182 - protein, 8 aa, synthetic construct
ISQSGGRT

SEQ ID NO: 1183 - protein, 8 aa, synthetic construct
ISQSGGRT

SEQ ID NO: 1184 - protein, 8 aa, synthetic construct
ISQSGGRT

SEQ ID NO: 1185 - protein, 8 aa, synthetic construct
ISGSGGRT

SEQ ID NO: 1186 - protein, 8 aa, synthetic construct
ISGGGGRT

SEQ ID NO: 1187 - protein, 8 aa, synthetic construct
ISQSGGRT

SEQ ID NO: 1188 - protein, 8 aa, synthetic construct
ISGSGGRT

SEQ ID NO: 1189 - protein, 8 aa, synthetic construct
ISQSGGRT

SEQ ID NO: 1190 - protein, 8 aa, synthetic construct
ISRSGGRT

SEQ ID NO: 1191 - protein, 8 aa, synthetic construct
ISRSGGRT

SEQ ID NO: 1192 - protein, 8 aa, synthetic construct
ISQSGGRT

SEQ ID NO: 1193 - protein, 8 aa, synthetic construct
ISQSGGRT

SEQ ID NO: 1194 - protein, 8 aa, synthetic construct
ISQGGGRT

SEQ ID NO: 1195 - protein, 8 aa, synthetic construct
ISQSGGRT

SEQ ID NO: 1196 - protein, 8 aa, synthetic construct
ISQSGGRT

SEQ ID NO: 1197 - protein, 8 aa, synthetic construct
ISQSGGRA

SEQ ID NO: 1198 - protein, 8 aa, synthetic construct
ISQSGGRT

SEQ ID NO: 1199 - protein, 8 aa, synthetic construct
ISGSGGRS

SEQ ID NO: 1200 - protein, 8 aa, synthetic construct
ISRSGGRT

SEQ ID NO: 1201 - protein, 8 aa, synthetic construct
ISRSGGRT

SEQ ID NO: 1202 - protein, 8 aa, synthetic construct
ISGSGGRT

SEQ ID NO: 1203 - protein, 8 aa, synthetic construct
ISGSGGRT

SEQ ID NO: 1204 - protein, 8 aa, synthetic construct
ISQSGGRT

SEQ ID NO: 1205 - protein, 8 aa, synthetic construct
ISGSGGRT

SEQ ID NO: 1206 - protein, 8 aa, synthetic construct
ISASGGRT

SEQ ID NO: 1207 - protein, 8 aa, synthetic construct
ISQSGGRT

SEQ ID NO: 1208 - protein, 8 aa, synthetic construct
ISRSGGRT

SEQ ID NO: 1209 - protein, 8 aa, synthetic construct
ISGSGGRT

SEQ ID NO: 1210 - protein, 8 aa, synthetic construct
ISQSGGRT

SEQ ID NO: 1211 - protein, 8 aa, synthetic construct
ISRSGGRT

SEQ ID NO: 1212 - protein, 8 aa, synthetic construct
ISQSGGRT

SEQ ID NO: 1213 - protein, 8 aa, synthetic construct
ISGGGGRT

SEQ ID NO: 1214 - protein, 8 aa, synthetic construct
ISQSGGRT

SEQ ID NO: 1215 - protein, 8 aa, synthetic construct
ISQSGGRT

SEQ ID NO: 1216 - protein, 8 aa, synthetic construct
ISQSGGRT

SEQ ID NO: 1217 - protein, 8 aa, synthetic construct
ISQSGGRT

SEQ ID NO: 1218 - protein, 8 aa, synthetic construct
ISQSGGRT

SEQ ID NO: 1219 - protein, 8 aa, synthetic construct
ISQSGGRT

SEQ ID NO: 1220 - protein, 8 aa, synthetic construct
ISRSGGRT

SEQ ID NO: 1221 - protein, 8 aa, synthetic construct
ISRSGGRT

SEQ ID NO: 1222 - protein, 8 aa, synthetic construct
ISQSGGRT

SEQ ID NO: 1223 - protein, 8 aa, synthetic construct
ISQSGGRT

SEQ ID NO: 1224 - protein, 8 aa, synthetic construct
ISQSGGRT

SEQ ID NO: 1225 - protein, 8 aa, synthetic construct
ISQSGGRT

SEQ ID NO: 1226 - protein, 8 aa, synthetic construct
ISRSGGRT

SEQ ID NO: 1227 - protein, 8 aa, synthetic construct
ISRSGGRT

SEQ ID NO: 1228 - protein, 8 aa, synthetic construct
ISSSGGRT

SEQ ID NO: 1229 - protein, 8 aa, synthetic construct
ISQSGGRT

SEQ ID NO: 1230 - protein, 8 aa, synthetic construct
ISQSGGRT

SEQ ID NO: 1231 - protein, 8 aa, synthetic construct
ISQSGGRT

SEQ ID NO: 1232 - protein, 8 aa, synthetic construct
ISQSGGRT

SEQ ID NO: 1233 - protein, 8 aa, synthetic construct
ISQSGGRT

SEQ ID NO: 1234 - protein, 8 aa, synthetic construct
ISRSGGRT

SEQ ID NO: 1235 - protein, 8 aa, synthetic construct
ISQSGGRT

SEQ ID NO: 1236 - protein, 5 aa, synthetic construct
NALQY

SEQ ID NO: 1237 - protein, 5 aa, synthetic construct
NALLY

SEQ ID NO: 1238 - protein, 5 aa, synthetic construct
NALQY

SEQ ID NO: 1239 - protein, 5 aa, synthetic construct
NALGY

SEQ ID NO: 1240 - protein, 5 aa, synthetic construct
NALPY

SEQ ID NO: 1241 - protein, 5 aa, synthetic construct
NALPY

SEQ ID NO: 1242 - protein, 5 aa, synthetic construct
NALQY

SEQ ID NO: 1243 - protein, 5 aa, synthetic construct
NALSY

SEQ ID NO: 1244 - protein, 5 aa, synthetic construct
NALSY

SEQ ID NO: 1245 - protein, 5 aa, synthetic construct
NALWY

SEQ ID NO: 1246 - protein, 5 aa, synthetic construct
NALHY

SEQ ID NO: 1247 - protein, 5 aa, synthetic construct
NALHY

SEQ ID NO: 1248 - protein, 5 aa, synthetic construct
NTLLY

SEQ ID NO: 1249 - protein, 5 aa, synthetic construct
NALGY

SEQ ID NO: 1250 - protein, 5 aa, synthetic construct
NALGY

SEQ ID NO: 1251 - protein, 5 aa, synthetic construct
NALWY

SEQ ID NO: 1252 - protein, 5 aa, synthetic construct
NALLY

SEQ ID NO: 1253 - protein, 5 aa, synthetic construct
NALGY

SEQ ID NO: 1254 - protein, 5 aa, synthetic construct
NALPY

SEQ ID NO: 1255 - protein, 5 aa, synthetic construct
NALLY

SEQ ID NO: 1256 - protein, 5 aa, synthetic construct
NALGY

SEQ ID NO: 1257 - protein, 5 aa, synthetic construct
NALLY

SEQ ID NO: 1258 - protein, 5 aa, synthetic construct
NALLY

SEQ ID NO: 1259 - protein, 5 aa, synthetic construct
NALPY

SEQ ID NO: 1260 - protein, 5 aa, synthetic construct
NALQY

SEQ ID NO: 1261 - protein, 5 aa, synthetic construct
NALWY

SEQ ID NO: 1262 - protein, 5 aa, synthetic construct
NALPY

SEQ ID NO: 1263 - protein, 5 aa, synthetic construct
NALWY

SEQ ID NO: 1264 - protein, 5 aa, synthetic construct
NALLY

SEQ ID NO: 1265 - protein, 5 aa, synthetic construct
NALQY

SEQ ID NO: 1266 - protein, 5 aa, synthetic construct
NALWY

SEQ ID NO: 1267 - protein, 5 aa, synthetic construct
NALLY

SEQ ID NO: 1268 - protein, 5 aa, synthetic construct
NALWY

SEQ ID NO: 1269 - protein, 5 aa, synthetic construct
NALRF

SEQ ID NO: 1270 - protein, 5 aa, synthetic construct
NALRF

SEQ ID NO: 1271 - protein, 5 aa, synthetic construct
NALRN

SEQ ID NO: 1272 - protein, 5 aa, synthetic construct
NALRN

SEQ ID NO: 1273 - protein, 5 aa, synthetic construct
NALRF

SEQ ID NO: 1274 - protein, 5 aa, synthetic construct
NALRL

SEQ ID NO: 1275 - protein, 5 aa, synthetic construct
NALRD

SEQ ID NO: 1276 - protein, 5 aa, synthetic construct
NALRD

SEQ ID NO: 1277 - protein, 5 aa, synthetic construct
NALRH

SEQ ID NO: 1278 - protein, 5 aa, synthetic construct
NALRF

SEQ ID NO: 1279 - protein, 5 aa, synthetic construct
NALRS

SEQ ID NO: 1280 - protein, 5 aa, synthetic construct
NALRH

SEQ ID NO: 1281 - protein, 5 aa, synthetic construct
NALRN

SEQ ID NO: 1282 - protein, 5 aa, synthetic construct
NALRD

SEQ ID NO: 1283 - protein, 5 aa, synthetic construct
NALRL

SEQ ID NO: 1284 - protein, 5 aa, synthetic construct
NALRN

SEQ ID NO: 1285 - protein, 5 aa, synthetic construct
NALRS

SEQ ID NO: 1286 - protein, 5 aa, synthetic construct
NALRS

SEQ ID NO: 1287 - protein, 5 aa, synthetic construct
NALRR

SEQ ID NO: 1288 - protein, 5 aa, synthetic construct
NALRH

SEQ ID NO: 1289 - protein, 5 aa, synthetic construct
NALRD

SEQ ID NO: 1290 - protein, 5 aa, synthetic construct
NALRH

SEQ ID NO: 1291 - protein, 5 aa, synthetic construct
NALRC

SEQ ID NO: 1292 - protein, 5 aa, synthetic construct
NALRN

SEQ ID NO: 1293 - protein, 5 aa, synthetic construct
NALRS

SEQ ID NO: 1294 - protein, 5 aa, synthetic construct
NALRD

SEQ ID NO: 1295 - protein, 5 aa, synthetic construct
NALRH

SEQ ID NO: 1296 - protein, 5 aa, synthetic construct
KTLRY

SEQ ID NO: 1297 - protein, 5 aa, synthetic construct
KTLRY

SEQ ID NO: 1298 - protein, 5 aa, synthetic construct
TTLRY

SEQ ID NO: 1299 - protein, 5 aa, synthetic construct
KTLRY

SEQ ID NO: 1300 - protein, 5 aa, synthetic construct
KTLRY

SEQ ID NO: 1301 - protein, 5 aa, synthetic construct
STLRY

SEQ ID NO: 1302 - protein, 15 aa, synthetic construct
AKGRHSGSYYPWDEY

SEQ ID NO: 1303 - protein, 15 aa, synthetic construct
AKGRLSGSYYPWDEY

SEQ ID NO: 1304 - protein, 15 aa, synthetic construct
AKGRHSGSYYPWDDY

SEQ ID NO: 1305 - protein, 15 aa, synthetic construct
AKGRNSGSYYPWDDY

SEQ ID NO: 1306 - protein, 15 aa, synthetic construct
AKGRNSGSYYPWDDY

SEQ ID NO: 1307 - protein, 15 aa, synthetic construct
AKGRGSGSYYPWDDH

SEQ ID NO: 1308 - protein, 15 aa, synthetic construct
AKGRNSGSYFPWDDY

SEQ ID NO: 1309 - protein, 15 aa, synthetic construct
AKGRHSGSYYPWDEY

SEQ ID NO: 1310 - protein, 15 aa, synthetic construct
AKGRGSGSYDPWDDY

SEQ ID NO: 1311 - protein, 15 aa, synthetic construct
AKGRNSGSYYPWDEY

SEQ ID NO: 1312 - protein, 15 aa, synthetic construct
AKGRNSGSYDPWDDY

SEQ ID NO: 1313 - protein, 15 aa, synthetic construct
AKGRHSGSYDPWDEY

SEQ ID NO: 1314 - protein, 15 aa, synthetic construct
AKGRNSGSYYPWDVY

SEQ ID NO: 1315 - protein, 15 aa, synthetic construct
AKGRHSGSYYPWDDY

SEQ ID NO: 1316 - protein, 15 aa, synthetic construct
AKGRNSGSFYPWDDY

SEQ ID NO: 1317 - protein, 15 aa, synthetic construct
AKGRNSGSYYAWDDY

SEQ ID NO: 1318 - protein, 15 aa, synthetic construct
TKGRHSGSYYPWDEY

SEQ ID NO: 1319 - protein, 15 aa, synthetic construct
AKGRHSGSYYPRDEY

SEQ ID NO: 1320 - protein, 15 aa, synthetic construct
AKGRHRGSYYPWDEY

SEQ ID NO: 1321 - protein, 15 aa, synthetic construct
AKGRNSGSDYPWDDY

SEQ ID NO: 1322 - protein, 15 aa, synthetic construct
AKGRHSGSYYPWDEH

SEQ ID NO: 1323 - protein, 15 aa, synthetic construct
AKGRHSGSYYPWDEH

SEQ ID NO: 1324 - protein, 15 aa, synthetic construct
ATGRGSGSYYPWDDY

SEQ ID NO: 1325 - protein, 15 aa, synthetic construct
AKGRNSGSYYPWGDY

SEQ ID NO: 1326 - protein, 15 aa, synthetic construct
AKGRNSGGYYPWDDY

SEQ ID NO: 1327 - protein, 15 aa, synthetic construct
ATGRGSGSYYPWDDY

SEQ ID NO: 1328 - protein, 15 aa, synthetic construct
ANGRHSGSYYPWDEY

SEQ ID NO: 1329 - protein, 15 aa, synthetic construct
AKGSHSGSYYPWDEY

SEQ ID NO: 1330 - protein, 15 aa, synthetic construct
AKGRHGGSYYPWDEY

SEQ ID NO: 1331 - protein, 15 aa, synthetic construct
SKGRHSGSYYPWDEY

SEQ ID NO: 1332 - protein, 15 aa, synthetic construct
AKGRNSGGYYPWDDY

SEQ ID NO: 1333 - protein, 15 aa, synthetic construct
AKGRLSGSYYPWDEY

SEQ ID NO: 1334 - protein, 15 aa, synthetic construct
AKGRNSGSYYTWDDY

SEQ ID NO: 1335 - protein, 15 aa, synthetic construct
SKGRHSGSYYPWDEY

SEQ ID NO: 1336 - protein, 15 aa, synthetic construct
AKGRHSGSDYPWDEY

SEQ ID NO: 1337 - protein, 15 aa, synthetic construct
AKGRNSGSYYPWYDY

SEQ ID NO: 1338 - protein, 15 aa, synthetic construct
AKGRGSGSYYPWDNY

SEQ ID NO: 1339 - protein, 15 aa, synthetic construct
AKGRHSGSYYPWEEY

SEQ ID NO: 1340 - protein, 15 aa, synthetic construct
ANGRHSGSYYPWDEY

SEQ ID NO: 1341 - protein, 15 aa, synthetic construct
AKGRHSGSYDPWDEY

SEQ ID NO: 1342 - protein, 15 aa, synthetic construct
AKGSHSGSYYPWDEY

SEQ ID NO: 1343 - protein, 15 aa, synthetic construct
AKGRNSVSYYPWDDY

SEQ ID NO: 1344 - protein, 15 aa, synthetic construct
AKGKHSGSYYPWDEY

SEQ ID NO: 1345 - protein, 15 aa, synthetic construct
AKGRNRGSYYPWDDY

SEQ ID NO: 1346 - protein, 15 aa, synthetic construct
AKGRNSGSYYHWDDY

SEQ ID NO: 1347 - protein, 15 aa, synthetic construct
ATGRHSGSYYPWDEY

SEQ ID NO: 1348 - protein, 15 aa, synthetic construct
AKGRHSGSYYPWEEY

SEQ ID NO: 1349 - protein, 15 aa, synthetic construct
AKGRNSGSYYPWDGY

SEQ ID NO: 1350 - protein, 15 aa, synthetic construct
AKGRHSGSDYPWDEY

SEQ ID NO: 1351 - protein, 15 aa, synthetic construct
AKGRGSGSYYPWDGY

SEQ ID NO: 1352 - protein, 15 aa, synthetic construct
AKVRNSGSYYPWDDY

SEQ ID NO: 1353 - protein, 15 aa, synthetic construct
AKVRNSGSYYPWDDY

SEQ ID NO: 1354 - protein, 15 aa, synthetic construct
AKGRGSGSYYPWEDY

SEQ ID NO: 1355 - protein, 15 aa, synthetic construct
AKGRNSGSYYPWEDY

SEQ ID NO: 1356 - protein, 15 aa, synthetic construct
AKGRHSGSYYPWDEY

SEQ ID NO: 1357 - protein, 15 aa, synthetic construct
AKGRLSGSYYPWDEY

SEQ ID NO: 1358 - protein, 15 aa, synthetic construct
AKGRHSGSYDPWDEY

SEQ ID NO: 1359 - protein, 15 aa, synthetic construct
AKGWGSGSYYPWDDY

SEQ ID NO: 1360 - protein, 15 aa, synthetic construct
AKVRHSGSYYPWDEY

SEQ ID NO: 1361 - protein, 15 aa, synthetic construct
AKGRHSGSYYPRDEY

SEQ ID NO: 1362 - protein, 15 aa, synthetic construct
AKGRHSGRYYPWDEY

SEQ ID NO: 1363 - protein, 15 aa, synthetic construct
AKGRNSGSHYPWDDY

SEQ ID NO: 1364 - protein, 15 aa, synthetic construct
AKGRGSGSYHPWDDY

SEQ ID NO: 1365 - protein, 15 aa, synthetic construct
AKGSGSGSYYPWDDY

SEQ ID NO: 1366 - protein, 15 aa, synthetic construct
AKGRGSGGYYPWDDY

SEQ ID NO: 1367 - protein, 15 aa, synthetic construct
AKGRHSVSYYPWDEY

SEQ ID NO: 1368 - protein, 15 aa, synthetic construct
AKGRLSGSYYPWDEY

SEQ ID NO: 1369 - protein, 15 aa, synthetic construct
AKGRNSGSYFPWDDY

SEQ ID NO: 1370 - protein, 15 aa, synthetic construct
AKGRNSGRYYPWDDY

SEQ ID NO: 1371 - protein, 15 aa, synthetic construct
AKGRGSGSYDPWDDY

SEQ ID NO: 1372 - protein, 15 aa, synthetic construct
AKGRHSGSYYPWYEY

SEQ ID NO: 1373 - protein, 15 aa, synthetic construct
AKGRGSGSYYPWDAY

SEQ ID NO: 1374 - protein, 15 aa, synthetic construct
AKGRHSGSSYPWDDY

SEQ ID NO: 1375 - protein, 15 aa, synthetic construct
AKGRHSGSYYPLDDY

SEQ ID NO: 1376 - protein, 15 aa, synthetic construct
AKGRHSGSYYPRDDY

SEQ ID NO: 1377 - protein, 15 aa, synthetic construct
AKGRHSGSYDPWDDY

SEQ ID NO: 1378 - protein, 15 aa, synthetic construct
ANGRHSGSYYPWDDY

SEQ ID NO: 1379 - protein, 15 aa, synthetic construct
AKGRHSGSYYPWEDY

SEQ ID NO: 1380 - protein, 15 aa, synthetic construct
AKGRHSGSYYPWYDY

SEQ ID NO: 1381 - protein, 15 aa, synthetic construct
AKGKHSGSYYPWDDY

SEQ ID NO: 1382 - protein, 15 aa, synthetic construct
AKGRHSGSYYPWDDH

SEQ ID NO: 1383 - protein, 15 aa, synthetic construct
AKGRHSGSYYPRDDY

SEQ ID NO: 1384 - protein, 15 aa, synthetic construct
AKGKHSGSYYPWDDY

SEQ ID NO: 1385 - protein, 15 aa, synthetic construct
AKGKHSGSYYPWDDY

SEQ ID NO: 1386 - protein, 15 aa, synthetic construct
AKGRHSGSYYPWDDH

SEQ ID NO: 1387 - protein, 15 aa, synthetic construct
AKVRHSGSYYPWDDY

SEQ ID NO: 1388 - protein, 15 aa, synthetic construct
AKGRHSGSYYHWDDY

SEQ ID NO: 1389 - protein, 15 aa, synthetic construct
ANGRHSGSYYPWDDY

SEQ ID NO: 1390 - protein, 15 aa, synthetic construct
AKGRHSGSYDPWDDY

SEQ ID NO: 1391 - protein, 15 aa, synthetic construct
AKGRHSGSDYPWDDY

SEQ ID NO: 1392 - protein, 15 aa, synthetic construct
AKGRNNGSYYPWDDY

SEQ ID NO: 1393 - protein, 15 aa, synthetic construct
AKGRHSGSYYPWEEY

SEQ ID NO: 1394 - protein, 15 aa, synthetic construct
AKGRGSGSYYPWDGY

SEQ ID NO: 1395 - protein, 15 aa, synthetic construct
AKGRHSGSYYPLDEY

SEQ ID NO: 1396 - protein, 15 aa, synthetic construct
AKGRGSGSYFPWDDY

SEQ ID NO: 1397 - protein, 15 aa, synthetic construct
AKGRHSGSYYHWDEY

SEQ ID NO: 1398 - protein, 15 aa, synthetic construct
AKGRHSGSYYPWDES

SEQ ID NO: 1399 - protein, 15 aa, synthetic construct
AKGRHSGSYYHWDEY

SEQ ID NO: 1400 - protein, 15 aa, synthetic construct
AKGMHSGSYYPWDEY

SEQ ID NO: 1401 - protein, 15 aa, synthetic construct
AKGRHRGSYYPWDEY

SEQ ID NO: 1402 - protein, 15 aa, synthetic construct
AKGRNIGSYYPWDDY

SEQ ID NO: 1403 - protein, 15 aa, synthetic construct
AKGRNSVSYYPWDDY

SEQ ID NO: 1404 - protein, 15 aa, synthetic construct
AKWRHSGSYYPWDEY

SEQ ID NO: 1405 - protein, 15 aa, synthetic construct
AKGRHSGSYYPWDES

SEQ ID NO: 1406 - protein, 15 aa, synthetic construct
AKGRHSGRYYPWDEY

SEQ ID NO: 1407 - protein, 15 aa, synthetic construct
AKGRHSGSYYPGDEY

SEQ ID NO: 1408 - protein, 15 aa, synthetic construct
AKGRHSGSSYPWDEY

SEQ ID NO: 1409 - protein, 15 aa, synthetic construct
AKWRHSGSYYPWDEY

SEQ ID NO: 1410 - protein, 15 aa, synthetic construct
AKGRNSGSSYPWDDY

SEQ ID NO: 1411 - protein, 15 aa, synthetic construct
AKGRHSGSSYPWDEY

SEQ ID NO: 1412 - protein, 15 aa, synthetic construct
AKGRNRGSYYPWDDY

SEQ ID NO: 1413 - protein, 15 aa, synthetic construct
AKGRHSGGYYPWDEY

SEQ ID NO: 1414 - protein, 15 aa, synthetic construct
AKGRGSGSYYPWGDY

SEQ ID NO: 1415 - protein, 16 aa, synthetic construct
AATNFLIATTISAYDY

SEQ ID NO: 1416 - protein, 16 aa, synthetic construct
AASDFLLATTISAYDY

SEQ ID NO: 1417 - protein, 16 aa, synthetic construct
AASNFLIATTISAYDY

SEQ ID NO: 1418 - protein, 16 aa, synthetic construct
AASNFLLATTNSAYDY

SEQ ID NO: 1419 - protein, 16 aa, synthetic construct
AASYFLLATTISGYDY

SEQ ID NO: 1420 - protein, 16 aa, synthetic construct
AASYFLLATTISGYDF

SEQ ID NO: 1421 - protein, 16 aa, synthetic construct
AASDFLIATSISAYDY

SEQ ID NO: 1422 - protein, 16 aa, synthetic construct
AASYFLLATTISGYDY

SEQ ID NO: 1423 - protein, 16 aa, synthetic construct
AASDFLIATSISAYDY

SEQ ID NO: 1424 - protein, 16 aa, synthetic construct
AASNFLIATTISAYDY

SEQ ID NO: 1425 - protein, 16 aa, synthetic construct
AASNFLIATTISAYDY

SEQ ID NO: 1426 - protein, 16 aa, synthetic construct
AATNFLRATTISAYDY

SEQ ID NO: 1427 - protein, 16 aa, synthetic construct
AATNFLMATTISAYDY

SEQ ID NO: 1428 - protein, 16 aa, synthetic construct
AASYFLLAITISGYDY

SEQ ID NO: 1429 - protein, 16 aa, synthetic construct
AASDFLLATTISAYDY

SEQ ID NO: 1430 - protein, 16 aa, synthetic construct
AATNFLIATTISAYDH

SEQ ID NO: 1431 - protein, 16 aa, synthetic construct
AASYFLIANTISGYDY

SEQ ID NO: 1432 - protein, 16 aa, synthetic construct
AATNFLIAATISAYDY

SEQ ID NO: 1433 - protein, 16 aa, synthetic construct
AATNFLIATTISAYGY

SEQ ID NO: 1434 - protein, 16 aa, synthetic construct
AATNFLIATTMSAYDY

SEQ ID NO: 1435 - protein, 16 aa, synthetic construct
AATNFLIAATISAYDY

SEQ ID NO: 1436 - protein, 16 aa, synthetic construct
AATNLLIATTISAYDY

SEQ ID NO: 1437 - protein, 16 aa, synthetic construct
ADTNFLIATTISAYDY

SEQ ID NO: 1438 - protein, 16 aa, synthetic construct
AATNSLIATTISAYDY

SEQ ID NO: 1439 - protein, 16 aa, synthetic construct
AASIFLLATTNSAYDY

SEQ ID NO: 1440 - protein, 16 aa, synthetic construct
AATNFLIATTISAYDS

SEQ ID NO: 1441 - protein, 16 aa, synthetic construct
AATNFLIAITISAYDY

SEQ ID NO: 1442 - protein, 16 aa, synthetic construct
AATKFLIATTISAYDY

SEQ ID NO: 1443 - protein, 16 aa, synthetic construct
TATNFLIATTISAYDY

SEQ ID NO: 1444 - protein, 16 aa, synthetic construct
AATNFLIATTISAHDY

SEQ ID NO: 1445 - protein, 16 aa, synthetic construct
AATNVLIATTISAYDY

SEQ ID NO: 1446 - protein, 16 aa, synthetic construct
AASYFLIANTISGYDY

SEQ ID NO: 1447 - protein, 16 aa, synthetic construct
AATNFPIATTISAYDY

SEQ ID NO: 1448 - protein, 16 aa, synthetic construct
AATNFLIATAISAYDY

SEQ ID NO: 1449 - protein, 16 aa, synthetic construct
AASDFLLATTISAYDY

SEQ ID NO: 1450 - protein, 16 aa, synthetic construct
AASDFLIATTISAYDY

SEQ ID NO: 1451 - protein, 16 aa, synthetic construct
AATNFLIATTISAYDD

SEQ ID NO: 1452 - protein, 16 aa, synthetic construct
AATNFLLATTISAYDY

SEQ ID NO: 1453 - protein, 16 aa, synthetic construct
AATNFLIATTMSAYDY

SEQ ID NO: 1454 - protein, 16 aa, synthetic construct
AASDFLIATTLSAYDY

SEQ ID NO: 1455 - protein, 16 aa, synthetic construct
AATNFLIATTISAYDF

SEQ ID NO: 1456 - protein, 16 aa, synthetic construct
AASNFLLATTNSAYDY

SEQ ID NO: 1457 - protein, 16 aa, synthetic construct
AATNFRIATTISAYDY

SEQ ID NO: 1458 - protein, 16 aa, synthetic construct
AVTNFLIATTISAYDY

SEQ ID NO: 1459 - protein, 16 aa, synthetic construct
AASDFPIAATISAYDY

SEQ ID NO: 1460 - protein, 16 aa, synthetic construct
AATNFLIATTISTYDY

SEQ ID NO: 1461 - protein, 16 aa, synthetic construct
AATNFPIATTISAYDY

SEQ ID NO: 1462 - protein, 16 aa, synthetic construct
AATNFLIATTIFAYDY

SEQ ID NO: 1463 - protein, 16 aa, synthetic construct
AASNFLLATTNSAYDY

SEQ ID NO: 1464 - protein, 16 aa, synthetic construct
AASDFLLATTTSAYDY

SEQ ID NO: 1465 - protein, 16 aa, synthetic construct
AASIFLLATTNSAYDY

SEQ ID NO: 1466 - protein, 16 aa, synthetic construct
AATIFLIATTISAYDY

SEQ ID NO: 1467 - protein, 16 aa, synthetic construct
AASNFLIATTISAYDY

SEQ ID NO: 1468 - protein, 16 aa, synthetic construct
AATNFLIETTISAYDY

SEQ ID NO: 1469 - protein, 16 aa, synthetic construct
AATNFLIATTISAYAY

SEQ ID NO: 1470 - protein, 16 aa, synthetic construct
AATYFLIATTISAYDY

SEQ ID NO: 1471 - protein, 16 aa, synthetic construct
AATNFLIATTISAFDY

SEQ ID NO: 1472 - protein, 16 aa, synthetic construct
AATNFLIATSISAYDY

SEQ ID NO: 1473 - protein, 16 aa, synthetic construct
AASYFLIANTISGYDY

SEQ ID NO: 1474 - protein, 16 aa, synthetic construct
AATDFLIATTISAYDY

SEQ ID NO: 1475 - protein, 16 aa, synthetic construct
AGSDFLMATTISAYDY

SEQ ID NO: 1476 - protein, 16 aa, synthetic construct
AASDFLIATTVSAYDY

SEQ ID NO: 1477 - protein, 16 aa, synthetic construct
AASDFLIATTVSAYDY

SEQ ID NO: 1478 - protein, 16 aa, synthetic construct
AATNFLIATNISAYDY

SEQ ID NO: 1479 - protein, 16 aa, synthetic construct
AATDFLIATTISAYDY

SEQ ID NO: 1480 - protein, 16 aa, synthetic construct
AASDFSIATTISAYDY

SEQ ID NO: 1481 - protein, 16 aa, synthetic construct
AASDFLLATTMSAYVY

SEQ ID NO: 1482 - protein, 16 aa, synthetic construct
AASYFLLAITISGYDY

SEQ ID NO: 1483 - protein, 16 aa, synthetic construct
AASNFLLATTNSAYGY

SEQ ID NO: 1484 - protein, 16 aa, synthetic construct
AASNFLLATTNSAYDY

SEQ ID NO: 1485 - protein, 16 aa, synthetic construct
AASDFLLATTISAYDY

SEQ ID NO: 1486 - protein, 16 aa, synthetic construct
AASDFLLATTISAYDY

SEQ ID NO: 1487 - protein, 16 aa, synthetic construct
AASDFLLATTISAYDY

SEQ ID NO: 1488 - protein, 16 aa, synthetic construct
AASDFLLATTISAYDY

SEQ ID NO: 1489 - protein, 16 aa, synthetic construct
AASDFLLATTISAYDY

SEQ ID NO: 1490 - protein, 16 aa, synthetic construct
AASDFFIATSISAYDY

SEQ ID NO: 1491 - protein, 16 aa, synthetic construct
AASDFLIATTLSAYDY

SEQ ID NO: 1492 - protein, 16 aa, synthetic construct
AASNFLLATTNSAYDY

SEQ ID NO: 1493 - protein, 16 aa, synthetic construct
AASYFLIATTLSAYDY

SEQ ID NO: 1494 - protein, 16 aa, synthetic construct
AATNFLIATTRSAYDY

SEQ ID NO: 1495 - protein, 16 aa, synthetic construct
AASYFLLATTMSGYDF

SEQ ID NO: 1496 - protein, 16 aa, synthetic construct
AASYFLLATTIFGYDF

SEQ ID NO: 1497 - protein, 16 aa, synthetic construct
AASNFLLATTNSAYDY

SEQ ID NO: 1498 - protein, 16 aa, synthetic construct
AASDSLLATTIPAYDY

SEQ ID NO: 1499 - protein, 16 aa, synthetic construct
AATNFLLATTISAYDY

SEQ ID NO: 1500 - protein, 16 aa, synthetic construct
AATNFLIATTISAYNY

SEQ ID NO: 1501 - protein, 16 aa, synthetic construct
AATNFQIATTISAYDY

SEQ ID NO: 1502 - protein, 16 aa, synthetic construct
AATNFLIAATISAYDY

SEQ ID NO: 1503 - protein, 16 aa, synthetic construct
AATNFLIATTVSAYDY

SEQ ID NO: 1504 - protein, 16 aa, synthetic construct
AASYFLMATSISAYDY

SEQ ID NO: 1505 - protein, 16 aa, synthetic construct
AASYFLLAATISGYDF

SEQ ID NO: 1506 - protein, 16 aa, synthetic construct
AASYFLRATTISGYDF

SEQ ID NO: 1507 - protein, 16 aa, synthetic construct
AASDFLIATTISVYDY

SEQ ID NO: 1508 - protein, 16 aa, synthetic construct
AASYFLVATSISAYDY

SEQ ID NO: 1509 - protein, 16 aa, synthetic construct
AATNFLIATTIYAYDY

SEQ ID NO: 1510 - protein, 16 aa, synthetic construct
AASDFLIATTISAYDH

SEQ ID NO: 1511 - protein, 16 aa, synthetic construct
AASYFLLATTMSAYDY

SEQ ID NO: 1512 - protein, 16 aa, synthetic construct
AASDFLLATTISAYDY

SEQ ID NO: 1513 - protein, 16 aa, synthetic construct
AASYVLLATTISGYDF

SEQ ID NO: 1514 - protein, 16 aa, synthetic construct
AASYFLMATSISAYDY

SEQ ID NO: 1515 - protein, 16 aa, synthetic construct
AASYFLIANTISGYDY

SEQ ID NO: 1516 - protein, 16 aa, synthetic construct
AASSFLLAITISGYDY

SEQ ID NO: 1517 - protein, 16 aa, synthetic construct
AASNFLLATTNSAYDY

SEQ ID NO: 1518 - protein, 16 aa, synthetic construct
AASDFLIATTIPAYDY

SEQ ID NO: 1519 - protein, 16 aa, synthetic construct
AASDFLLATTISGYDF

SEQ ID NO: 1520 - protein, 16 aa, synthetic construct
AATDFLIATTISAYDY

SEQ ID NO: 1521 - protein, 16 aa, synthetic construct
AATNFLIATTISEYDY

SEQ ID NO: 1522 - protein, 16 aa, synthetic construct
ASTNFLIATTISAYDY

SEQ ID NO: 1523 - protein, 16 aa, synthetic construct
AATNFLIATTLSAYDY

SEQ ID NO: 1524 - protein, 16 aa, synthetic construct
AATNFLIATTISAYVY

SEQ ID NO: 1525 - protein, 16 aa, synthetic construct
AASYFLLAITISAYDY

SEQ ID NO: 1526 - protein, 16 aa, synthetic construct
AASYLLLATTISGYDF

SEQ ID NO: 1527 - protein, 16 aa, synthetic construct
AATNFLIATTISAFDY

SEQ ID NO: 1528 - protein, 16 aa, synthetic construct
AATNFLISTTISAYDY

SEQ ID NO: 1529 - protein, 16 aa, synthetic construct
AASDFLLATTMSAYGY

SEQ ID NO: 1530 - protein, 16 aa, synthetic construct
VASDFLLATTISAYDY

SEQ ID NO: 1531 - protein, 16 aa, synthetic construct
AASYFLLATTISGYDF

SEQ ID NO: 1532 - protein, 16 aa, synthetic construct
AASYFLLATTISGYDF

SEQ ID NO: 1533 - protein, 16 aa, synthetic construct
AASDFLIATTISAYDY

SEQ ID NO: 1534 - protein, 16 aa, synthetic construct
AATNFLITTTISAYDY

SEQ ID NO: 1535 - protein, 16 aa, synthetic construct
AATNFLIATIISAYDY

SEQ ID NO: 1536 - protein, 16 aa, synthetic construct
AATSFLIATTISAYDY

SEQ ID NO: 1537 - protein, 16 aa, synthetic construct
AATNFLTATTISAYDY

SEQ ID NO: 1538 - protein, 16 aa, synthetic construct
ATTNFLIATTISAYDY

SEQ ID NO: 1539 - protein, 16 aa, synthetic construct
AASYFPLATTISGYDF

SEQ ID NO: 1540 - protein, 16 aa, synthetic construct
AASNFLLATANSAYDY

SEQ ID NO: 1541 - protein, 111 aa, synthetic construct; identical to SEQ ID NO: 4

SEQ ID NO: 1542 - protein, 111 aa, synthetic construct; identical to SEQ ID NO: 43

SEQ ID NO: 1543 - protein, 111 aa, synthetic construct; identical to SEQ ID NO: 44

SEQ ID NO: 1544 - protein, 111 aa, synthetic construct; identical to SEQ ID NO: 45

SEQ ID NO: 1545 - protein, 111 aa, synthetic construct; identical to SEQ ID NO: 46

SEQ ID NO: 1546 - protein, 111 aa, synthetic construct; identical to SEQ ID NO: 47

SEQ ID NO: 1547 - protein, 111 aa, synthetic construct; identical to SEQ ID NO: 48

SEQ ID NO: 1548 - protein, 111 aa, synthetic construct; identical to SEQ ID NO: 49

SEQ ID NO: 1549 - protein, 111 aa, synthetic construct; identical to SEQ ID NO: 50

SEQ ID NO: 1550 - protein, 111 aa, synthetic construct; identical to SEQ ID NO: 51

SEQ ID NO: 1551 - protein, 111 aa, synthetic construct; identical to SEQ ID NO: 52

SEQ ID NO: 1552 - protein, 111 aa, synthetic construct; identical to SEQ ID NO: 53

SEQ ID NO: 1553 - protein, 111 aa, synthetic construct; identical to SEQ ID NO: 54

SEQ ID NO: 1554 - protein, 111 aa, synthetic construct; identical to SEQ ID NO: 55

SEQ ID NO: 1555 - protein, 111 aa, synthetic construct; identical to SEQ ID NO: 56

SEQ ID NO: 1556 - protein, 111 aa, synthetic construct; identical to SEQ ID NO: 57

SEQ ID NO: 1557 - protein, 111 aa, synthetic construct; identical to SEQ ID NO: 58

SEQ ID NO: 1558 - protein, 111 aa, synthetic construct; identical to SEQ ID NO: 59

SEQ ID NO: 1559 - protein, 111 aa, synthetic construct; identical to SEQ ID NO: 60

SEQ ID NO: 1560 - protein, 111 aa, synthetic construct; identical to SEQ ID NO: 61

SEQ ID NO: 1561 - protein, 111 aa, synthetic construct; identical to SEQ ID NO: 62

SEQ ID NO: 1562 - protein, 111 aa, synthetic construct; identical to SEQ ID NO: 63

SEQ ID NO: 1563 - protein, 111 aa, synthetic construct; identical to SEQ ID NO: 64

SEQ ID NO: 1564 - protein, 111 aa, synthetic construct; identical to SEQ ID NO: 65

SEQ ID NO: 1565 - protein, 111 aa, synthetic construct; identical to SEQ ID NO: 66

SEQ ID NO: 1566 - protein, 111 aa, synthetic construct; identical to SEQ ID NO: 67

SEQ ID NO: 1567 - protein, 111 aa, synthetic construct; identical to SEQ ID NO: 68

SEQ ID NO: 1568 - protein, 111 aa, synthetic construct; identical to SEQ ID NO: 69

SEQ ID NO: 1569 - protein, 111 aa, synthetic construct; identical to SEQ ID NO: 70

SEQ ID NO: 1570 - protein, 111 aa, synthetic construct; identical to SEQ ID NO: 71

SEQ ID NO: 1571 - protein, 111 aa, synthetic construct; identical to SEQ ID NO: 72

SEQ ID NO: 1572 - protein, 111 aa, synthetic construct; identical to SEQ ID NO: 73

SEQ ID NO: 1573 - protein, 111 aa, synthetic construct; identical to SEQ ID NO: 74

SEQ ID NO: 1574 - protein, 111 aa, synthetic construct; identical to SEQ ID NO: 8

SEQ ID NO: 1575 - protein, 111 aa, synthetic construct; identical to SEQ ID NO: 75

SEQ ID NO: 1576 - protein, 111 aa, synthetic construct; identical to SEQ ID NO: 76

SEQ ID NO: 1577 - protein, 111 aa, synthetic construct; identical to SEQ ID NO: 77

SEQ ID NO: 1578 - protein, 111 aa, synthetic construct; identical to SEQ ID NO: 78

SEQ ID NO: 1579 - protein, 111 aa, synthetic construct; identical to SEQ ID NO: 79

SEQ ID NO: 1580 - protein, 111 aa, synthetic construct; identical to SEQ ID NO: 80

SEQ ID NO: 1581 - protein, 111 aa, synthetic construct; identical to SEQ ID NO: 81

SEQ ID NO: 1582 - protein, 111 aa, synthetic construct; identical to SEQ ID NO: 82

SEQ ID NO: 1583 - protein, 111 aa, synthetic construct; identical to SEQ ID NO: 83

SEQ ID NO: 1584 - protein, 111 aa, synthetic construct; identical to SEQ ID NO: 84

SEQ ID NO: 1585 - protein, 111 aa, synthetic construct; identical to SEQ ID NO: 85

SEQ ID NO: 1586 - protein, 111 aa, synthetic construct; identical to SEQ ID NO: 86

SEQ ID NO: 1587 - protein, 111 aa, synthetic construct; identical to SEQ ID NO: 87

SEQ ID NO: 1588 - protein, 111 aa, synthetic construct; identical to SEQ ID NO: 88

SEQ ID NO: 1589 - protein, 111 aa, synthetic construct; identical to SEQ ID NO: 89

SEQ ID NO: 1590 - protein, 111 aa, synthetic construct; identical to SEQ ID NO: 90

SEQ ID NO: 1591 - protein, 111 aa, synthetic construct; identical to SEQ ID NO: 91

SEQ ID NO: 1592 - protein, 111 aa, synthetic construct; identical to SEQ ID NO: 92

SEQ ID NO: 1593 - protein, 111 aa, synthetic construct; identical to SEQ ID NO: 93

SEQ ID NO: 1594 - protein, 111 aa, synthetic construct; identical to SEQ ID NO: 94

SEQ ID NO: 1595 - protein, 111 aa, synthetic construct; identical to SEQ ID NO: 95

SEQ ID NO: 1596 - protein, 111 aa, synthetic construct; identical to SEQ ID NO: 96

SEQ ID NO: 1597 - protein, 111 aa, synthetic construct; identical to SEQ ID NO: 97

SEQ ID NO: 1598 - protein, 111 aa, synthetic construct; identical to SEQ ID NO: 98

SEQ ID NO: 1599 - protein, 111 aa, synthetic construct; identical to SEQ ID NO: 99

SEQ ID NO: 1600 - protein, 111 aa, synthetic construct; identical to SEQ ID NO: 100

SEQ ID NO: 1601 - protein, 111 aa, synthetic construct; identical to SEQ ID NO: 12

SEQ ID NO: 1602 - protein, 111 aa, synthetic construct; identical to SEQ ID NO: 101

SEQ ID NO: 1603 - protein, 111 aa, synthetic construct; identical to SEQ ID NO: 102

SEQ ID NO: 1604 - protein, 111 aa, synthetic construct; identical to SEQ ID NO: 103

SEQ ID NO: 1605 - protein, 111 aa, synthetic construct; identical to SEQ ID NO: 104

SEQ ID NO: 1606 - protein, 111 aa, synthetic construct; identical to SEQ ID NO: 105

SEQ ID NO: 1607 - protein, 122 aa, synthetic construct; identical to SEQ ID NO: 106

SEQ ID NO: 1608 - protein, 122 aa, synthetic construct; identical to SEQ ID NO: 107

SEQ ID NO: 1609 - protein, 122 aa, synthetic construct; identical to SEQ ID NO: 108

SEQ ID NO: 1610 - protein, 122 aa, synthetic construct; identical to SEQ ID NO: 109

SEQ ID NO: 1611 - protein, 122 aa, synthetic construct; identical to SEQ ID NO: 16

SEQ ID NO: 1612 - protein, 122 aa, synthetic construct; identical to SEQ ID NO: 110

SEQ ID NO: 1613 - protein, 122 aa, synthetic construct; identical to SEQ ID NO: 111

SEQ ID NO: 1614 - protein, 122 aa, synthetic construct; identical to SEQ ID NO: 112

SEQ ID NO: 1615 - protein, 122 aa, synthetic construct; identical to SEQ ID NO: 113

SEQ ID NO: 1616 - protein, 122 aa, synthetic construct; identical to SEQ ID NO: 114

SEQ ID NO: 1617 - protein, 122 aa, synthetic construct; identical to SEQ ID NO: 115

SEQ ID NO: 1618 - protein, 122 aa, synthetic construct; identical to SEQ ID NO: 116

SEQ ID NO: 1619 - protein, 122 aa, synthetic construct; identical to SEQ ID NO: 117

SEQ ID NO: 1620 - protein, 122 aa, synthetic construct; identical to SEQ ID NO: 118

SEQ ID NO: 1621 - protein, 122 aa, synthetic construct; identical to SEQ ID NO: 119

SEQ ID NO: 1622 - protein, 122 aa, synthetic construct; identical to SEQ ID NO: 120

SEQ ID NO: 1623 - protein, 122 aa, synthetic construct; identical to SEQ ID NO: 121

SEQ ID NO: 1624 - protein, 122 aa, synthetic construct; identical to SEQ ID NO: 122

SEQ ID NO: 1625 - protein, 122 aa, synthetic construct; identical to SEQ ID NO: 123

SEQ ID NO: 1626 - protein, 122 aa, synthetic construct; identical to SEQ ID NO: 124

SEQ ID NO: 1627 - protein, 122 aa, synthetic construct; identical to SEQ ID NO: 125

SEQ ID NO: 1628 - protein, 122 aa, synthetic construct; identical to SEQ ID NO: 126

SEQ ID NO: 1629 - protein, 122 aa, synthetic construct; identical to SEQ ID NO: 127

SEQ ID NO: 1630 - protein, 122 aa, synthetic construct; identical to SEQ ID NO: 128

SEQ ID NO: 1631 - protein, 122 aa, synthetic construct; identical to SEQ ID NO: 129

SEQ ID NO: 1632 - protein, 122 aa, synthetic construct; identical to SEQ ID NO: 130

SEQ ID NO: 1633 - protein, 122 aa, synthetic construct; identical to SEQ ID NO: 131

SEQ ID NO: 1634 - protein, 122 aa, synthetic construct; identical to SEQ ID NO: 132

SEQ ID NO: 1635 - protein, 122 aa, synthetic construct; identical to SEQ ID NO: 133

SEQ ID NO: 1636 - protein, 122 aa, synthetic construct; identical to SEQ ID NO: 134

SEQ ID NO: 1637 - protein, 122 aa, synthetic construct; identical to SEQ ID NO: 135

SEQ ID NO: 1638 - protein, 122 aa, synthetic construct; identical to SEQ ID NO: 136

SEQ ID NO: 1639 - protein, 122 aa, synthetic construct; identical to SEQ ID NO: 137

SEQ ID NO: 1640 - protein, 122 aa, synthetic construct; identical to SEQ ID NO: 138

SEQ ID NO: 1641 - protein, 122 aa, synthetic construct; identical to SEQ ID NO: 139

SEQ ID NO: 1642 - protein, 122 aa, synthetic construct; identical to SEQ ID NO: 140

SEQ ID NO: 1643 - protein, 122 aa, synthetic construct; identical to SEQ ID NO: 141

SEQ ID NO: 1644 - protein, 122 aa, synthetic construct; identical to SEQ ID NO: 142

SEQ ID NO: 1645 - protein, 122 aa, synthetic construct; identical to SEQ ID NO: 143

SEQ ID NO: 1646 - protein, 122 aa, synthetic construct; identical to SEQ ID NO: 144

SEQ ID NO: 1647 - protein, 122 aa, synthetic construct; identical to SEQ ID NO: 145

SEQ ID NO: 1648 - protein, 122 aa, synthetic construct; identical to SEQ ID NO: 146

SEQ ID NO: 1649 - protein, 122 aa, synthetic construct; identical to SEQ ID NO: 147

SEQ ID NO: 1650 - protein, 122 aa, synthetic construct; identical to SEQ ID NO: 148

SEQ ID NO: 1651 - protein, 122 aa, synthetic construct; identical to SEQ ID NO: 149

SEQ ID NO: 1652 - protein, 122 aa, synthetic construct; identical to SEQ ID NO: 150

SEQ ID NO: 1653 - protein, 122 aa, synthetic construct; identical to SEQ ID NO: 151

SEQ ID NO: 1654 - protein, 122 aa, synthetic construct; identical to SEQ ID NO: 152

SEQ ID NO: 1655 - protein, 122 aa, synthetic construct; identical to SEQ ID NO: 153

SEQ ID NO: 1656 - protein, 122 aa, synthetic construct; identical to SEQ ID NO: 154

SEQ ID NO: 1657 - protein, 122 aa, synthetic construct; identical to SEQ ID NO: 155

SEQ ID NO: 1658 - protein, 122 aa, synthetic construct; identical to SEQ ID NO: 156

SEQ ID NO: 1659 - protein, 122 aa, synthetic construct; identical to SEQ ID NO: 157

SEQ ID NO: 1660 - protein, 122 aa, synthetic construct; identical to SEQ ID NO: 158

SEQ ID NO: 1661 - protein, 122 aa, synthetic construct; identical to SEQ ID NO: 159

SEQ ID NO: 1662 - protein, 122 aa, synthetic construct; identical to SEQ ID NO: 160

SEQ ID NO: 1663 - protein, 122 aa, synthetic construct; identical to SEQ ID NO: 161

SEQ ID NO: 1664 - protein, 122 aa, synthetic construct; identical to SEQ ID NO: 162

SEQ ID NO: 1665 - protein, 122 aa, synthetic construct; identical to SEQ ID NO: 163

SEQ ID NO: 1666 - protein, 122 aa, synthetic construct; identical to SEQ ID NO: 164

SEQ ID NO: 1667 - protein, 122 aa, synthetic construct; identical to SEQ ID NO: 165

SEQ ID NO: 1668 - protein, 122 aa, synthetic construct; identical to SEQ ID NO: 166

SEQ ID NO: 1669 - protein, 122 aa, synthetic construct; identical to SEQ ID NO: 167

SEQ ID NO: 1670 - protein, 122 aa, synthetic construct; identical to SEQ ID NO: 168

SEQ ID NO: 1671 - protein, 122 aa, synthetic construct; identical to SEQ ID NO: 169

SEQ ID NO: 1672 - protein, 122 aa, synthetic construct; identical to SEQ ID NO: 170

SEQ ID NO: 1673 - protein, 122 aa, synthetic construct; identical to SEQ ID NO: 171

SEQ ID NO: 1674 - protein, 122 aa, synthetic construct; identical to SEQ ID NO: 172

SEQ ID NO: 1675 - protein, 122 aa, synthetic construct; identical to SEQ ID NO: 173

SEQ ID NO: 1676 - protein, 122 aa, synthetic construct; identical to SEQ ID NO: 174

SEQ ID NO: 1677 - protein, 122 aa, synthetic construct; identical to SEQ ID NO: 175

SEQ ID NO: 1678 - protein, 122 aa, synthetic construct; identical to SEQ ID NO: 176

SEQ ID NO: 1679 - protein, 122 aa, synthetic construct; identical to SEQ ID NO: 177

SEQ ID NO: 1680 - protein, 122 aa, synthetic construct; identical to SEQ ID NO: 178

SEQ ID NO: 1681 - protein, 122 aa, synthetic construct; identical to SEQ ID NO: 179

SEQ ID NO: 1682 - protein, 122 aa, synthetic construct; identical to SEQ ID NO: 180

SEQ ID NO: 1683 - protein, 122 aa, synthetic construct; identical to SEQ ID NO: 181

SEQ ID NO: 1684 - protein, 122 aa, synthetic construct; identical to SEQ ID NO: 182

SEQ ID NO: 1685 - protein, 122 aa, synthetic construct; identical to SEQ ID NO: 183

SEQ ID NO: 1686 - protein, 122 aa, synthetic construct; identical to SEQ ID NO: 184

SEQ ID NO: 1687 - protein, 122 aa, synthetic construct; identical to SEQ ID NO: 185

SEQ ID NO: 1688 - protein, 122 aa, synthetic construct; identical to SEQ ID NO: 186

SEQ ID NO: 1689 - protein, 122 aa, synthetic construct; identical to SEQ ID NO: 187

SEQ ID NO: 1690 - protein, 122 aa, synthetic construct; identical to SEQ ID NO: 188

SEQ ID NO: 1691 - protein, 122 aa, synthetic construct; identical to SEQ ID NO: 189

SEQ ID NO: 1692 - protein, 122 aa, synthetic construct; identical to SEQ ID NO: 190

SEQ ID NO: 1693 - protein, 122 aa, synthetic construct; identical to SEQ ID NO: 191

SEQ ID NO: 1694 - protein, 122 aa, synthetic construct; identical to SEQ ID NO: 192

SEQ ID NO: 1695 - protein, 122 aa, synthetic construct; identical to SEQ ID NO: 193

SEQ ID NO: 1696 - protein, 122 aa, synthetic construct; identical to SEQ ID NO: 194

SEQ ID NO: 1697 - protein, 122 aa, synthetic construct; identical to SEQ ID NO: 195

SEQ ID NO: 1698 - protein, 122 aa, synthetic construct; identical to SEQ ID NO: 196

SEQ ID NO: 1699 - protein, 122 aa, synthetic construct; identical to SEQ ID NO: 197

SEQ ID NO: 1700 - protein, 122 aa, synthetic construct; identical to SEQ ID NO: 198

SEQ ID NO: 1701 - protein, 122 aa, synthetic construct; identical to SEQ ID NO: 199

SEQ ID NO: 1702 - protein, 122 aa, synthetic construct; identical to SEQ ID NO: 200

SEQ ID NO: 1703 - protein, 122 aa, synthetic construct; identical to SEQ ID NO: 201

SEQ ID NO: 1704 - protein, 122 aa, synthetic construct; identical to SEQ ID NO: 202

SEQ ID NO: 1705 - protein, 122 aa, synthetic construct; identical to SEQ ID NO: 203

SEQ ID NO: 1706 - protein, 122 aa, synthetic construct; identical to SEQ ID NO: 204

SEQ ID NO: 1707 - protein, 122 aa, synthetic construct; identical to SEQ ID NO: 205

SEQ ID NO: 1708 - protein, 122 aa, synthetic construct; identical to SEQ ID NO: 206

SEQ ID NO: 1709 - protein, 122 aa, synthetic construct; identical to SEQ ID NO: 207

SEQ ID NO: 1710 - protein, 122 aa, synthetic construct; identical to SEQ ID NO: 208

SEQ ID NO: 1711 - protein, 122 aa, synthetic construct; identical to SEQ ID NO: 209

SEQ ID NO: 1712 - protein, 122 aa, synthetic construct; identical to SEQ ID NO: 210

SEQ ID NO: 1713 - protein, 122 aa, synthetic construct; identical to SEQ ID NO: 211

SEQ ID NO: 1714 - protein, 122 aa, synthetic construct; identical to SEQ ID NO: 212

SEQ ID NO: 1715 - protein, 122 aa, synthetic construct; identical to SEQ ID NO: 213

SEQ ID NO: 1716 - protein, 122 aa, synthetic construct; identical to SEQ ID NO: 214

SEQ ID NO: 1717 - protein, 122 aa, synthetic construct; identical to SEQ ID NO: 215

SEQ ID NO: 1718 - protein, 122 aa, synthetic construct; identical to SEQ ID NO: 216

SEQ ID NO: 1719 - protein, 122 aa, synthetic construct; identical to SEQ ID NO: 217

SEQ ID NO: 1720 - protein, 123 aa, synthetic construct; identical to SEQ ID NO: 218

SEQ ID NO: 1721 - protein, 123 aa, synthetic construct; identical to SEQ ID NO: 20

SEQ ID NO: 1722 - protein, 123 aa, synthetic construct; identical to SEQ ID NO: 219

SEQ ID NO: 1723 - protein, 123 aa, synthetic construct; identical to SEQ ID NO: 220

SEQ ID NO: 1724 - protein, 123 aa, synthetic construct; identical to SEQ ID NO: 221

SEQ ID NO: 1725 - protein, 123 aa, synthetic construct; identical to SEQ ID NO: 222

SEQ ID NO: 1726 - protein, 123 aa, synthetic construct; identical to SEQ ID NO: 223

SEQ ID NO: 1727 - protein, 123 aa, synthetic construct; identical to SEQ ID NO: 224

SEQ ID NO: 1728 - protein, 123 aa, synthetic construct; identical to SEQ ID NO: 225

SEQ ID NO: 1729 - protein, 123 aa, synthetic construct; identical to SEQ ID NO: 226

SEQ ID NO: 1730 - protein, 123 aa, synthetic construct; identical to SEQ ID NO: 227

SEQ ID NO: 1731 - protein, 123 aa, synthetic construct; identical to SEQ ID NO: 228

SEQ ID NO: 1732 - protein, 123 aa, synthetic construct; identical to SEQ ID NO: 229

SEQ ID NO: 1733 - protein, 123 aa, synthetic construct; identical to SEQ ID NO: 230

SEQ ID NO: 1734 - protein, 123 aa, synthetic construct; identical to SEQ ID NO: 231

SEQ ID NO: 1735 - protein, 123 aa, synthetic construct; identical to SEQ ID NO: 232

SEQ ID NO: 1736 - protein, 123 aa, synthetic construct; identical to SEQ ID NO: 233

SEQ ID NO: 1737 - protein, 123 aa, synthetic construct; identical to SEQ ID NO: 234

SEQ ID NO: 1738 - protein, 123 aa, synthetic construct; identical to SEQ ID NO: 235

SEQ ID NO: 1739 - protein, 123 aa, synthetic construct; identical to SEQ ID NO: 236

SEQ ID NO: 1740 - protein, 123 aa, synthetic construct; identical to SEQ ID NO: 237

SEQ ID NO: 1741 - protein, 123 aa, synthetic construct; identical to SEQ ID NO: 238

SEQ ID NO: 1742 - protein, 123 aa, synthetic construct; identical to SEQ ID NO: 239

SEQ ID NO: 1743 - protein, 123 aa, synthetic construct; identical to SEQ ID NO: 240

SEQ ID NO: 1744 - protein, 123 aa, synthetic construct; identical to SEQ ID NO: 241

SEQ ID NO: 1745 - protein, 123 aa, synthetic construct; identical to SEQ ID NO: 242

SEQ ID NO: 1746 - protein, 123 aa, synthetic construct; identical to SEQ ID NO: 243

SEQ ID NO: 1747 - protein, 123 aa, synthetic construct; identical to SEQ ID NO: 244

SEQ ID NO: 1748 - protein, 123 aa, synthetic construct; identical to SEQ ID NO: 245

SEQ ID NO: 1749 - protein, 123 aa, synthetic construct; identical to SEQ ID NO: 246

SEQ ID NO: 1750 - protein, 123 aa, synthetic construct; identical to SEQ ID NO: 247

SEQ ID NO: 1751 - protein, 123 aa, synthetic construct; identical to SEQ ID NO: 248

SEQ ID NO: 1752 - protein, 123 aa, synthetic construct; identical to SEQ ID NO: 249

SEQ ID NO: 1753 - protein, 123 aa, synthetic construct; identical to SEQ ID NO: 250

SEQ ID NO: 1754 - protein, 123 aa, synthetic construct; identical to SEQ ID NO: 251

SEQ ID NO: 1755 - protein, 123 aa, synthetic construct; identical to SEQ ID NO: 252

SEQ ID NO: 1756 - protein, 123 aa, synthetic construct; identical to SEQ ID NO: 253

SEQ ID NO: 1757 - protein, 123 aa, synthetic construct; identical to SEQ ID NO: 254

SEQ ID NO: 1758 - protein, 123 aa, synthetic construct; identical to SEQ ID NO: 255

SEQ ID NO: 1759 - protein, 123 aa, synthetic construct; identical to SEQ ID NO: 256

SEQ ID NO: 1760 - protein, 123 aa, synthetic construct; identical to SEQ ID NO: 257

SEQ ID NO: 1761 - protein, 123 aa, synthetic construct; identical to SEQ ID NO: 258

SEQ ID NO: 1762 - protein, 123 aa, synthetic construct; identical to SEQ ID NO: 259

SEQ ID NO: 1763 - protein, 123 aa, synthetic construct; identical to SEQ ID NO: 260

SEQ ID NO: 1764 - protein, 123 aa, synthetic construct; identical to SEQ ID NO: 261

SEQ ID NO: 1765 - protein, 123 aa, synthetic construct; identical to SEQ ID NO: 262

SEQ ID NO: 1766 - protein, 123 aa, synthetic construct; identical to SEQ ID NO: 263

SEQ ID NO: 1767 - protein, 123 aa, synthetic construct; identical to SEQ ID NO: 264

SEQ ID NO: 1768 - protein, 123 aa, synthetic construct; identical to SEQ ID NO: 265

SEQ ID NO: 1769 - protein, 123 aa, synthetic construct; identical to SEQ ID NO: 266

SEQ ID NO: 1770 - protein, 123 aa, synthetic construct; identical to SEQ ID NO: 267

SEQ ID NO: 1771 - protein, 123 aa, synthetic construct; identical to SEQ ID NO: 268

SEQ ID NO: 1772 - protein, 123 aa, synthetic construct; identical to SEQ ID NO: 269

SEQ ID NO: 1773 - protein, 123 aa, synthetic construct; identical to SEQ ID NO: 270

SEQ ID NO: 1774 - protein, 123 aa, synthetic construct; identical to SEQ ID NO: 271

SEQ ID NO: 1775 - protein, 123 aa, synthetic construct; identical to SEQ ID NO: 272

SEQ ID NO: 1776 - protein, 123 aa, synthetic construct; identical to SEQ ID NO: 273

SEQ ID NO: 1777 - protein, 123 aa, synthetic construct; identical to SEQ ID NO: 274

SEQ ID NO: 1778 - protein, 123 aa, synthetic construct; identical to SEQ ID NO: 275

SEQ ID NO: 1779 - protein, 123 aa, synthetic construct; identical to SEQ ID NO: 276

SEQ ID NO: 1780 - protein, 123 aa, synthetic construct; identical to SEQ ID NO: 277

SEQ ID NO: 1781 - protein, 123 aa, synthetic construct; identical to SEQ ID NO: 278

SEQ ID NO: 1782 - protein, 123 aa, synthetic construct; identical to SEQ ID NO: 279

SEQ ID NO: 1783 - protein, 123 aa, synthetic construct; identical to SEQ ID NO: 280

SEQ ID NO: 1784 - protein, 123 aa, synthetic construct; identical to SEQ ID NO: 281

SEQ ID NO: 1785 - protein, 123 aa, synthetic construct; identical to SEQ ID NO: 282

SEQ ID NO: 1786 - protein, 123 aa, synthetic construct; identical to SEQ ID NO: 283

SEQ ID NO: 1787 - protein, 123 aa, synthetic construct; identical to SEQ ID NO: 284

SEQ ID NO: 1788 - protein, 123 aa, synthetic construct; identical to SEQ ID NO: 285

SEQ ID NO: 1789 - protein, 123 aa, synthetic construct; identical to SEQ ID NO: 286

SEQ ID NO: 1790 - protein, 123 aa, synthetic construct; identical to SEQ ID NO: 287

SEQ ID NO: 1791 - protein, 123 aa, synthetic construct; identical to SEQ ID NO: 288

SEQ ID NO: 1792 - protein, 123 aa, synthetic construct; identical to SEQ ID NO: 289

SEQ ID NO: 1793 - protein, 123 aa, synthetic construct; identical to SEQ ID NO: 290

SEQ ID NO: 1794 - protein, 123 aa, synthetic construct; identical to SEQ ID NO: 291

SEQ ID NO: 1795 - protein, 123 aa, synthetic construct; identical to SEQ ID NO: 292

SEQ ID NO: 1796 - protein, 123 aa, synthetic construct; identical to SEQ ID NO: 293

SEQ ID NO: 1797 - protein, 123 aa, synthetic construct; identical to SEQ ID NO: 294

SEQ ID NO: 1798 - protein, 123 aa, synthetic construct; identical to SEQ ID NO: 295

SEQ ID NO: 1799 - protein, 123 aa, synthetic construct; identical to SEQ ID NO: 296

SEQ ID NO: 1800 - protein, 123 aa, synthetic construct; identical to SEQ ID NO: 297

SEQ ID NO: 1801 - protein, 123 aa, synthetic construct; identical to SEQ ID NO: 298

SEQ ID NO: 1802 - protein, 123 aa, synthetic construct; identical to SEQ ID NO: 299

SEQ ID NO: 1803 - protein, 123 aa, synthetic construct; identical to SEQ ID NO: 300

SEQ ID NO: 1804 - protein, 123 aa, synthetic construct; identical to SEQ ID NO: 301

SEQ ID NO: 1805 - protein, 123 aa, synthetic construct; identical to SEQ ID NO: 302

SEQ ID NO: 1806 - protein, 123 aa, synthetic construct; identical to SEQ ID NO: 303

SEQ ID NO: 1807 - protein, 123 aa, synthetic construct; identical to SEQ ID NO: 304

SEQ ID NO: 1808 - protein, 123 aa, synthetic construct; identical to SEQ ID NO: 305

SEQ ID NO: 1809 - protein, 123 aa, synthetic construct; identical to SEQ ID NO: 306

SEQ ID NO: 1810 - protein, 123 aa, synthetic construct; identical to SEQ ID NO: 307

SEQ ID NO: 1811 - protein, 123 aa, synthetic construct; identical to SEQ ID NO: 308

SEQ ID NO: 1812 - protein, 123 aa, synthetic construct; identical to SEQ ID NO: 309

SEQ ID NO: 1813 - protein, 123 aa, synthetic construct; identical to SEQ ID NO: 310

SEQ ID NO: 1814 - protein, 123 aa, synthetic construct; identical to SEQ ID NO: 311

SEQ ID NO: 1815 - protein, 123 aa, synthetic construct; identical to SEQ ID NO: 312

SEQ ID NO: 1816 - protein, 123 aa, synthetic construct; identical to SEQ ID NO: 313

SEQ ID NO: 1817 - protein, 123 aa, synthetic construct; identical to SEQ ID NO: 314

SEQ ID NO: 1818 - protein, 123 aa, synthetic construct; identical to SEQ ID NO: 315

SEQ ID NO: 1819 - protein, 123 aa, synthetic construct; identical to SEQ ID NO: 316

SEQ ID NO: 1820 - protein, 123 aa, synthetic construct; identical to SEQ ID NO: 317

SEQ ID NO: 1821 - protein, 123 aa, synthetic construct; identical to SEQ ID NO: 318

SEQ ID NO: 1822 - protein, 123 aa, synthetic construct; identical to SEQ ID NO: 319

SEQ ID NO: 1823 - protein, 123 aa, synthetic construct; identical to SEQ ID NO: 320

SEQ ID NO: 1824 - protein, 123 aa, synthetic construct; identical to SEQ ID NO: 321

SEQ ID NO: 1825 - protein, 123 aa, synthetic construct; identical to SEQ ID NO: 322

SEQ ID NO: 1826 - protein, 123 aa, synthetic construct; identical to SEQ ID NO: 323

SEQ ID NO: 1827 - protein, 123 aa, synthetic construct; identical to SEQ ID NO: 324

SEQ ID NO: 1828 - protein, 123 aa, synthetic construct; identical to SEQ ID NO: 325

SEQ ID NO: 1829 - protein, 123 aa, synthetic construct; identical to SEQ ID NO: 326

SEQ ID NO: 1830 - protein, 123 aa, synthetic construct; identical to SEQ ID NO: 327

SEQ ID NO: 1831 - protein, 123 aa, synthetic construct; identical to SEQ ID NO: 328

SEQ ID NO: 1832 - protein, 123 aa, synthetic construct; identical to SEQ ID NO: 329

SEQ ID NO: 1833 - protein, 123 aa, synthetic construct; identical to SEQ ID NO: 330

SEQ ID NO: 1834 - protein, 123 aa, synthetic construct; identical to SEQ ID NO: 331

SEQ ID NO: 1835 - protein, 123 aa, synthetic construct; identical to SEQ ID NO: 332

SEQ ID NO: 1836 - protein, 123 aa, synthetic construct; identical to SEQ ID NO: 333

SEQ ID NO: 1837 - protein, 123 aa, synthetic construct; identical to SEQ ID NO: 334

SEQ ID NO: 1838 - protein, 123 aa, synthetic construct; identical to SEQ ID NO: 335

SEQ ID NO: 1839 - protein, 123 aa, synthetic construct; identical to SEQ ID NO: 336

SEQ ID NO: 1840 - protein, 123 aa, synthetic construct; identical to SEQ ID NO: 337

SEQ ID NO: 1841 - protein, 123 aa, synthetic construct; identical to SEQ ID NO: 338

SEQ ID NO: 1842 - protein, 123 aa, synthetic construct; identical to SEQ ID NO: 339

SEQ ID NO: 1843 - protein, 123 aa, synthetic construct; identical to SEQ ID NO: 340

SEQ ID NO: 1844 - protein, 123 aa, synthetic construct; identical to SEQ ID NO: 341

SEQ ID NO: 1845 - protein, 123 aa, synthetic construct; identical to SEQ ID NO: 342

SEQ ID NO: 1846 - DNA, 333 bp, synthetic construct; identical to SEQ ID NO: 21
  source 1..333: mol_type = other DNA

SEQ ID NO: 1847 - DNA, 333 bp, synthetic construct
  source 1..333: mol_type = other DNA
gaggtgcagctggtggagtctgggggaggcttggtgcaggctggggggtctctgagactctcctgtgcagcctctggcagaagcttcagtacccttattatggcctggtaccgccaggctccagggaagcagcgcgagttggtcgcgactgttgatagggatggtacggcaacctatgcagactccgtgaagggccgattcttcatctccagagacaacgccaagaacacggtgactctgcaaatgaacaacctgaaacctgaggacacagccatgtattactgtaatgccctcctgtactggggccaggggacccaggtcaccgtctcctca

SEQ ID NO: 1848 - DNA, 333 bp, synthetic construct
  source 1..333: mol_type = other DNA
gaggtgcagctggtggagtctgggggaggcttggtgcaggctggggggtctctgagactctcctgtgcagcctctggcagaagcttcagtacccttattatggcctggtaccgccaggctccagggaagcagcgcgagttggtcgcgactgttgatagggatggtacggcaacctatgcagactccgtgaagggccgattcttcatctccagagacaacgccaagaacacggtgactctgcaaatgaacaacttgaaacctgaggacacagccatgtattactgtaatgccctccagtactggggccaggggacccaggtcaccgtctcctca

SEQ ID NO: 1849 - DNA, 333 bp, synthetic construct
  source 1..333: mol_type = other DNA
gaggtgcagctggtggagtctgggggaggcttggtgcaggctggggggtctctgagactctcctgtgcagcctctggcagaagcttcagtacccttattatggcctggtaccgccaggctccagggaagcagcgcgagttggtcgcgactattgagagggatggtacgacaacctatgcagactccgtgaagggccgatttatcatctccagagacaacgccaagaacacggtgactctgcaaatgaacaacctgaaacctgatgatacagccatctattactgtaatgccctcgggtactggggccaggggacccaggtcaccgtctcctca

SEQ ID NO: 1850 - DNA, 333 bp, synthetic construct
  source 1..333: mol_type = other DNA
gaggtgcagctggtggagtctgggggaggcttggtgcaggctggggggtctctgagactctcctgtgcagcctctggcagaagcttcagtacccttattatggcctggtaccgccaggctccagggaagcagcgcgagttggtcgcgactgttgatagggatggtacggcaacctatgcagactccgtgaagggccgattcttcatctccagagacaacgccaagaacacggtgactctgcaaatgaacaacctgaaacctgaggacacagccatgtattactgtaatgccctcccgtactggggccaggggacccaggtcaccgtctcctca

SEQ ID NO: 1851 - DNA, 333 bp, synthetic construct
  source 1..333: mol_type = other DNA
gaggtgcagctggtggagtctgggggaggcttggtgcaggctggggagtctctgagactctcctgtgcagcctctggcagaagcttcagtacccttattatggcctggtaccgccaggctccagggaagcagcgcgagttggtcgcgactattgagagggatggtacaacaacctatgcagacaccgtgaagggccgattcttcatctccagagacaacaccaagaacacggtgactctacaaatgaacaacctaaaacctgatgacacagccatctattactgtaatgccctcccgtactggggccaggggacccaggtcaccgtctcctca

SEQ ID NO: 1852 - DNA, 333 bp, synthetic construct
  source 1..333: mol_type = other DNA
gaggtgcagctggtggagtctgggggaggcttggtgcaggctggggggtctctgacactctcctgtgcagcctctggacgaagcttcagtaccctgattatggcctggtaccgccaggctccagggaagcagcgcgagttggtcgcgactattgaaagggatggtacgccaacctatgcagactccgtggaggcccgattcttcatctccagggacaacgccaagaacacggtgactctgcaaatgaacaacctgaagcctgaggacacagccatctattactgtaatgccctccagtactggggccaggggacccaggtcaccgtctcctca

SEQ ID NO: 1853 - DNA, 333 bp, synthetic construct
  source 1..333: mol_type = other DNA
gaggtgcagctggtggagtctgggggaggcttggtgcaggctggggggtctctgaagctctcctgtcgagtgtctggaatgcccttcgataggatttccttgggctggtaccgccaggcttcggggaatcagcgcgaactggtcgcgcgaattactgcgcttgacgatacattttataccgactccgtgaagggccgattcaccatcgacagagacaacgccgagaacacggtgtatctgcaaatgaacactttgaaacctgaggacacagccgtctattactgtaacgccctctcctactggggccaggggacccaggtcaccgtctcctca

SEQ ID NO: 1854 - DNA, 333 bp, synthetic construct
  source 1..333: mol_type = other DNA
gaggtgcagctggtggagtctgggggaggcttggtgcaggctggggggtctctgaagctctcctgtcgagtgtctggaatgcccttcgacaggatttctttgggctggtaccgcgaacgttcgggaaatcagcgcgagctggtcgcgcgaattactatgcttgacgaaacattttatatcgagtccgtgaagggccgattcaccatcgacagagacaacgccgagaacacggtgtctctgcaaatgaacactttgaaacctgaggacacagctgtctattactgtaacgccctctcctactggggccaggggacccaggtcaccgtctcctca

SEQ ID NO: 1855 - DNA, 333 bp, synthetic construct
  source 1..333: mol_type = other DNA
gaggtgcagctggtggagtctgggggaggcttggtgcaggctggggggtctctgagactctcctgtgcagcctctggcagaagcttcagtacccttattatggcctggtaccgccaggctccagggaagcagcgcgagttggtcgcgactgttgatagggatggtacggcaacctatgcagactccgtgaagggccgattcttcatctccagagacaacgccaagaacacggtgactctgcaaatgaacaacctgaaacctgaggacacagccatgtattactgtaatgccctctggtactggggccaggggacccaggtcaccgtctcctca

SEQ ID NO: 1856 - DNA, 333 bp, synthetic construct
  source 1..333: mol_type = other DNA
gaggtgcagctggtggagtctgggggaggcttggtgcaggctggggggtctctgagactctcctgtgcagcctctggcagaaaattcagtacccttattatggcctggtaccgccaggctccagagaatcagcgcgagttggtcgcgacggttgatagggatggtacgacaacctatgcagactccgtgaagggccgattcttcatctccagagacaacgccaagaacatggtgactctgcaaatgaacaacctgaaacctgaggacacagccatctattactgtaatgccctccactactggggccaggggacccaggtcaccgtctcctca

SEQ ID NO: 1857 - DNA, 333 bp, synthetic construct
  source 1..333: mol_type = other DNA
gaggtgcagctggtggagtctgggggaggcttggtgcaggctggggggtctctgagactctcctgtgcagcctctggcagaagcttcagtacccttattatggcctggtaccgccaggctccagggaagcagcgcgagttggtcgcgactattgacagggatggtacgacaatgtatgcagactccgtggagggtcggttcaccataagcagagacaacgccaagaacacggtgactctgcaaatgaacgacccgaaacgtgaggacacagccgtctattactgtaatgccctccactactggggccaggggacccaggtcaccgtctcctca

SEQ ID NO: 1858 - DNA, 333 bp, synthetic construct
  source 1..333: mol_type = other DNA
gaggtgcagctggtggagtctgggggaggcttggtgcaggctggggggtctctgagactctcctgtgtagcctctggaagaatcttcagtagccttattatgacctggtaccgccaggctccaggtaagaagcgcgagttcgtcgcgacaattggaacatctggaaacacatattatgcagactccgtggagggccgattcaccatctccagagacgacgccaagaacacggtgtctctgcaaatggacagcctgaaacctaacgacacagccgtctattactgtaatacactcttgtattggggccggggggcccaggtcaccgtctcctca

SEQ ID NO: 1859 - DNA, 333 bp, synthetic construct
  source 1..333: mol_type = other DNA
gaggtgcagctggtggagtctgggggaggcttggtgcaggctggggggtctctgagactctcctgtgcagcctctggacgaagcttcagtaccctgattatggcctggtaccgccaggctccagggaagcagcgcgagttggtcgcgactattgaaagggatggtacgccaacctatgcagagtccgtggaggcccgattcttcatctccagagacaacgccaagaacacggtgactctgcaaatgaacaacctgaagcctgaggacacagccatctattactgtaatgccctcgggtactggggccaggggacccaggtcaccgtctcctca

SEQ ID NO: 1860 - DNA, 333 bp, synthetic construct
  source 1..333: mol_type = other DNA
gaggtgcagctggtggagtctgggggaggcttggtgcaggctggggggtctctgagactctcctgtgcagcctctggacgaagcttcagtacccttattatggcctggtaccgccaggctccagggaagcagcgcgagttggtcgcgactattgagaggggtggtacgccaacctatgcagactccgtggagggccgattcttcatctccagagacaacgccaagaacacggtgactctgcaaatgaacgacctgaaacctgaggacacagccacctattactgtaatgccctcgggtactggggccaggggacccaggtcaccgtctcctca

SEQ ID NO: 1861 - DNA, 333 bp, synthetic construct
  source 1..333: mol_type = other DNA
gaggtgcagctggtggagtctgggggaggcttggtgcaggctggggggtctctgagactctcctgtgcagcctctggcagaagcttcagtactcttattatgggctggtaccgccaggctccagggaagcagcgcgagttggtcgcgactattgagaggggtggtacaacaacctatgcagactccgtggagggtcgattcttcatctccagagacaacgccaagaacacggtgactctgcaaatgaacaacctgaaacctgatgacacagccatctattactgtaatgccctctggtactggggccaggggacccaggtcaccgtctcctca

SEQ ID NO: 1862 - DNA, 333 bp, synthetic construct
  source 1..333: mol_type = other DNA
gaggtgcagctggtggagtctgggggaggcttggtgcaggctggggggtctctgagactctcctgtgcagcctctggacgaagcttcagtacccttattatggcctggtaccgccaggctccagggaagcagcgcgagttggtcgcgactattgagagggatggtacgccaacctatacagactccgtgaagggccgattcttcatctccagagacaacgccaagaacacggtgactctgcacatgaacaacctgaaacctgaggacacagccatctattactgtaatgccctcctgtactggggccaggggacccaggtcaccgtctcctca

SEQ ID NO: 1863 - DNA, 333 bp, synthetic construct
  source 1..333: mol_type = other DNA
gaggtgcagctggtggagtctgggggaggcttggtgcaggctgggggctctctgagactctcctgtgcaacctctggcagaagcttcagtacccttattatggcctggtaccgccaggctccagggaagcagcgcgagttggtcgcgactattaatagggatagtacgacagactatgcagactccgtgaagggccgattcttcatctccagagacaacgccaagaacacggtgactctgcaaatgaacaacctgaaacctgaggacacagccatctattactgtaatgccctcgggtactggggccaggggacccaggtcaccgtctcctca

SEQ ID NO: 1864 - DNA, 333 bp, synthetic construct
  source 1..333: mol_type = other DNA
gaggtgcagctggtggagtctgggggaggcttggtgcaggctggggggtctctgagactctcctgtgcagcctctggacgaagcttcagtaccctgattatggcctggtaccgccaggctccagggtcgcagcgcgagttggtcgcgactattgaaagggatggtacgacaacctatgcagactccgtgaagggccgagtcttcatctccagagacaacgccaagaacacggtgactctgcaaatgaacaacctgaaacctgaggacacagccatctattactgcaatgccctcccgtactggggccaggggacccaggtcaccgtctcctca

SEQ ID NO: 1865 - DNA, 333 bp, synthetic construct
  source 1..333: mol_type = other DNA
gaggtgcagctggtggagtctgggggaggcttggtgcaggctggggagtctctgagactctcctgtgcagcctctggcagaagcttcagtacccttattatggcctggtaccgccaggctccagggaagcagcgcgagttggtcgcgactattgagagggatggtacaacaacctatgcagacaccgtgaagggccgattcttcatctccagagacaacaccaagaacacggtgactctacaaatgaacaacctaaaacctgatgacacagccatctattactgtaatgccctcctgtactggggccaggggacccaggtcaccgtctcctca

SEQ ID NO: 1866 - DNA, 333 bp, synthetic construct
  source 1..333: mol_type = other DNA
gaggtgcagctggtggagtctgggggaggcttggtgcaggctggggggtctctgggactctcctgtgcagcctctggcagaagcttcagtacccttattatggcctggtaccgccaggctccagggaagcagcgcgagttggtcgcgactattgagaggggtggtacgacaacctatgcagactccgtgaagggccgattcttcgcctccagagacaacgccaagaacacggtgactctgcaaatgaacaacctgaaacctgatgacacagccatctattactgtaatgccctcgggtactggggccaggggacccaggtcaccgtctcctca

SEQ ID NO: 1867 - DNA, 333 bp, synthetic construct
  source 1..333: mol_type = other DNA
gaggtgcagctggtggagtctgggggaggcttggtgcaggctggggggtctctgagactctcctgtgcagcctctggacgaaggttcagtacccttattatggcctggtaccgccaggctccagggaagcagcgcgagttggtcgcgactgctgaaagggatggtacgactacctatgaagactccgtgaagggccgattcttcatctccagagacaacgccaagaacacggtgactctgcaaatgaacaacctgaaacctgaggacacagccatctattactgtaatgccctcctgtactggggccaggggacccaggtcaccgtctcctca

SEQ ID NO: 1868 - DNA, 333 bp, synthetic construct
  source 1..333: mol_type = other DNA
gaggtgcagctggtggagtctgggggaggcttggtgcaggctggggggtctctgagactctcctgtgcagcctctggacgaagcttcagtaccctgattatggcctggtaccgccaggctccagggaagcagcgcgagttggtcgcgactattgaaagggatggtacgccaacctatgcagactccgtgaagggccgattcttcatctccagagacaacgccaagaacacggtgactctgcaaatgaacaacctgaaacctgaggacacagccatctattactgtaatgccctcctgtactggggccaggggacccaggtcaccgtctcctca

SEQ ID NO: 1869 - DNA, 333 bp, synthetic construct
  source 1..333: mol_type = other DNA
gaggtgcagctggtggagtctgggggaggcttggtgcaggctggggggtctctgagactctcctgtgcagcctctggacgaaggttcagtacccttattatggcctggtaccgccaggctccagggaagcagcgcgagttggtcgcgactgctgaaagggatggtacgacaacctatgaagactccgtgaagggccgattcttcatctccagagacaacgccaagaacacggtgactctgcaaatgaacaacctgaaacctgaggacacagccatctattactgtaatgccctcccgtactggggccaggggacccaggtcaccgtctcctca

SEQ ID NO: 1870 - DNA, 333 bp, synthetic construct
  source 1..333: mol_type = other DNA
gaggtgcagctggtggagtctgggggaggcttggtgcaggctggggggtctctgagactctcctgtgcagcctctggacgaaaattcagtacccttattatggcctggtaccgccaggctccagggaagcagcgcgagttggtcgcgactattgagagggatggtacgacaacctatgcagacttcgtggagggccgattcttcatctccagagacaacgccaagaacacggtgactctgcaaatgaacaacctggaacctgaggactcagccacctattactgtaatgccctccaatactggggccaggggacccaggtcaccgtctcctca

SEQ ID NO: 1871 - DNA, 333 bp, synthetic construct
  source 1..333: mol_type = other DNA
gaggtgcagctggtggagtctgggggaggcttggtgcaggctggggggtctctgagactctcctgtgcagcctctggacgaagcttcagtacccttattatggcctggtaccgccaggctccagggaaacagcgcgagttggtcgcgactattgaaagggatagtacgccaacctatgcagactccgtgaagggccgattcttcatctccagagacaacgccaagaacacggtgactctgcaaatgaacaacctgaaacctgaggacacagccatctattactgtaatgccctctggtactggggccaggggacccaggtcaccgtctcctca

SEQ ID NO: 1872 - DNA, 333 bp, synthetic construct
  source 1..333: mol_type = other DNA
gaggtgcagctggtggagtctgggggaggcttggtgcaggctggggggtctctgagactctcctgtgcagcctctggacgaagcttcagtacccttattatggcctggtaccgccaggctccagggaagcagcgcgagttggtcgcgactattgaaagggatggtacgacaacctatgcagactccgtgaagggccgattcatcttctccagagacaacgccaagaacacggtgactctgcaaatgaacaacctgaaacctgaggacacagccatctattattgtaacgccctcccgtactggggccaggggacccaggtcaccgtctcctca

SEQ ID NO: 1873 - DNA, 333 bp, synthetic construct
  source 1..333: mol_type = other DNA
gaggtgcagctggtggagtctgggggaggcttggtgcaggctggggggtctctgagactctcctgtgcagcctctggcagaagcttcagtacccttattatggcctggtaccgccaggctccagggaagcagcgcgagttggtcgcgactattgatagggatggtacggcaacctatgcagactccgtggagggccgattcttcatctccagagacaacgccaagaacacggtgactctgcaaatgaataacctgaaaccggaggacacagccatgtattactgtaatgccctctggtactggggccaggggacccaggtcaccgtctcctca

SEQ ID NO: 1874 - DNA, 333 bp, synthetic construct
  source 1..333: mol_type = other DNA
gaggtgcagctggtggagtctgggggaggcttggtgcaggctggggggtctctgagactctcctgtgcagcctctggcagaagcttcagtacccttattatggcctggtaccgccaggctccagggaagcagcgcgagttggtcgcgactattgataggggtggtacgacaacctatgcagactccgtggagggccgattcttcatctccagagacaacgccaagaacactgtgactctgcaaatgaacaacctgaaacctgatgacacagccctctattactgtaatgccctcctgtactggggccaggggacccaggtcaccgtctcctca

SEQ ID NO: 1875 - DNA, 333 bp, synthetic construct
  source 1..333: mol_type = other DNA
gaggtgcagctggtggagtctgggggaggcttggtgcaggctggggagtctctgagactctcctgtgcagcctctggcagaagcttcagtacccttattatggcctggtaccgccaggctccagggaagcagcgcgagttggtcgcgactattgagagggatggtacaacaacctatgcagacaccgtgaagggccgattcttcatctccagagacaacaccaagaacacggtgactctacaaatgaacaacctaaaacctgatgacacagccatctattactgtaatgccctccagtactggggccaggggacccaggtcaccgtctcctca

SEQ ID NO: 1876 - DNA, 333 bp, synthetic construct
  source 1..333: mol_type = other DNA
gaggtgcagctggtggagtctgggggaggcttggtgcaggctggggggtctctgagactctcctgtgcagcctctggcagaagcttcagtacccttattatggcctggtaccgccaggctccagggaagcagcgcgagttggtcgcgactattgataggggtggtacgacaacctatgcagactccgtggagggccgattcttcatctccagagacaacgccaagaacacggtgactctgcaaatgaacaacctgaaacctgatgacacagccctctattactgtaatgccctctggtactggggccaggggacccaggtcaccgtctcctca

SEQ ID NO: 1877 - DNA, 333 bp, synthetic construct
  source 1..333: mol_type = other DNA
gaggtgcagctggtggagtctgggggaggcttggtgcaggctggggggtctctgagactctcctgtgcagcctctggcagaagcttcagtacccttattatgggctggtaccgccaggctccagggaagcagcgcgagttggtcgcgactattgagaggggtggtacaacaacctatgcagactccgtggagggtcgattcttcatctccagagacaacgccaagaacacggtgactctgcaaatgaacaacctgaaacctgatgacacagccatctattactgtaatgccctcctgtactggggccaggggacccaggtcaccgtctcctca

SEQ ID NO: 1878 - DNA, 333 bp, synthetic construct
  source 1..333: mol_type = other DNA
gaggtgcagctggtggagtctgggggaggcttggtgcaggctggggggtctctgagactctcctgtgcagcctctggacgaagcttcagtacccttattatggcctggtaccgccaggctcccgggtcgcagcgcgagttggtcgcgactattgaaagggatggtacgacaacctatgcagactccgtgaagggccgagtcttcatctccagagacaacgccaagaacacggtgactctgcaaatgaacaacctgaaacctgaggacacagccatctattactgcaatgccctctggtactggggccaggggacccaggtcaccgtctcctca

SEQ ID NO: 1879 - DNA, 333 bp, synthetic construct; identical to SEQ ID NO: 22
  source 1..333: mol_type = other DNA

SEQ ID NO: 1880 - DNA, 333 bp, synthetic construct
  source 1..333: mol_type = other DNA
gaggtgcagctggtggagtctgggggaggcttggtgcaggctggggggtctctgagactctcctgtgcagcctctggcagaagcttcagtacccttattatggcctggtaccgccaggctccaagaaagcagcgcgagttggtcgcgactattgaaagggatggtacgccaacctatgcagactccgtgaagggccgattcttcatctccagagacaacgccaacaacacggtgactctgcaaatggacaacctgaaacctgaggacacagccatctattactgtaatgccctccggttctggggccaggggacccaggtcaccgtctcctca

SEQ ID NO: 1881 - DNA, 333 bp, synthetic construct
  source 1..333: mol_type = other DNA
gaggtgcagctggtggagtctgggggaggcttggtgcaggctggggggtctctgagactctcctgtgcagcctctggcagaagcttcagtacccttattatggcctggtaccgccaggctccagggaagcagcgcgagttggtcgcgactgttgatagggatggtacggcaacctatgcagactccgtgaagggccgattcttcatctccagagacaacgccaagaacacggtgactctgcaaatgaacaacctgaaacctgaggacacagccatgtattactgtaatgccctccggaactggggccaggggacccaggtcaccgtctcctca

SEQ ID NO: 1882 - DNA, 333 bp, synthetic construct
  source 1..333: mol_type = other DNA
gaggtgcagctggtggagtctgggggaggcttggtgcaggctggggggtctctgagactctcctgtgcagcctctggcagaaagttcagtaccctgattatggcctggtaccgccaggctccagggaagcagcgcgagttggtcgcgactgttgataggggtggtacgacaacctattcagactccgtgaagggccgattcttcatctccagagacaacgccaagaacacgacgactctgcaaatgaacaacctgaaacctgatgacacagccatctattactgtaatgccctccggaactggggccaggggacccaggtcaccgtctcctca

SEQ ID NO: 1883 - DNA, 333 bp, synthetic construct
  source 1..333: mol_type = other DNA
gaggtgcagctggtggagtctgggggaggcttggtgcaggctggggggtctctgagactctcctgtgcagcctctggcagaagcttcagtacccttattatgggctggtaccgccaggctccagggaagcagcgcgagttggtcgcgactattaatagggatggtacgacaacctatgcagactccgtgaagggccgattcttcatctccagagacaacgccaagaacacggtgactctgcaaatgaacaacctgaaacctgatgacacagccatctattactgtaatgccctccggttctggggccaggggacccaggtcaccgtctcctca

SEQ ID NO: 1884 - DNA, 333 bp, synthetic construct
  source 1..333: mol_type = other DNA
gaggtgcagctggtggagtctgggggaggcttggtgcagcctggggggtctctgagactctcctgtgcagcctctggcagaagcttcagtacccttattatggcctggtaccgccaggctccaggggagcagcgcgagttggtcgcgactattgagagggacggtacgccaacctatacagactccgtgaagggccgattcttcatctccagagacaacgccaagaacacggtgactctgcaaatgaacaacctgaaacctgaggacacagccatctattactgtaatgccctccggctctggggccaggggacccaggtcaccgtctcctca

SEQ ID NO: 1885 - DNA, 333 bp, synthetic construct
  source 1..333: mol_type = other DNA
gaggtgcagctggtggagtctgggggaggcttggtgcaggctggggggtctctgagactctcctgtgcagcctctggcagaagcttcagtacccttattatggcctggtaccgccaggctccagggaagcagcgcgagttggtcgcgactgttgatagggatggtacggcaacctatgcagactccgtgaagggccgattcttcatctccagagacaacgccaagaacacggtgactctgcaaatgaacaacctgaaacctgaggacacagccatgtattactgtaatgccctccgggactggggccaggggacccaggtcaccgtctcctca

SEQ ID NO: 1886 - DNA, 333 bp, synthetic construct
  source 1..333: mol_type = other DNA
gaggtgcagctggtggagtctgggggaggcttggtgcaggctggggggtctctgagactctcctgtgcagcctctggcagaagcttcagtacccttattatgggctggtaccgccaggctccagggaagcagcgcgagttggtcgcgactattgagaggggtggtacaacaacctatgcagactccgtggagggtcgattcttcatctccagagacaacgccaagaacacggtgactctgcaaatgaacaacctgaaacctgatgacacagccatctattactgtaatgccctccgggactggggccaggggacccaggtcaccgtctcctca

SEQ ID NO: 1887 - DNA, 333 bp, synthetic construct
  source 1..333: mol_type = other DNA
gaggtgcagctggtggagtctgggggaggcttggtgcaggctggggggtctctgagactctcctgtgcagcctctggcagaagcttcagtacccttattatggcctggtaccgccaggctccagggaagcagcgcgagttggtcgcgactgttgatagggatggtacggcaacctatgcagactccgtgaagggccgattcttcatctccagagacaacgccaagaacacggtgactctgcaaatgaacaacctgaaacctgaggacacagccatgtattactgtaatgccctccggcactggggccaggggacccaggtcaccgtctcctca

SEQ ID NO: 1888 - DNA, 333 bp, synthetic construct
  source 1..333: mol_type = other DNA
gaggtgcagctggtggagtctgggggaggcttggtgcaggctggggggtctctgacactctcctgtgcagccgctggcagaaaattcagtacccttattatggcctggtaccgccaggccccagggaagcagcgcgagttggtcgcgactattgaaagggatggtacgacaagctatgaagactccgtgaagggccgattcttcatctccagagacaacgccaagaacacagtgactctgcaaatgaacaacctgaaacctgaggacacagccatctattactgtaatgccctccggttctggggccaggggacccaggtcaccgtctcctca

SEQ ID NO: 1889 - DNA, 333 bp, synthetic construct
  source 1..333: mol_type = other DNA
gaggtgcagctggtggagtctgggggaggcttggtgcaggctggggggtctctgagactctcctgtgcagcctctggacgaagcttcagtacccttattatggcctggtaccgccaggctccagggaagcagcgcgagttggtcgcgactattgaaagggatggtacgacaacctatgcagactccgtgaagggccgattcttcttctccagagacaacgccaagaacacggtgactctgcaaatgaacaacctgaaacctgaggacacagccatctattattgtaatgccctccggtcctggggccaggggacccaggtcaccgtctcctca

SEQ ID NO: 1890 - DNA, 333 bp, synthetic construct
  source 1..333: mol_type = other DNA
gaggtgcagctggtggagtctgggggaggcttggtgcaggctggggagtctctgagactctcctgtgcagcctctggcagaagcttcagtacccttattatggcctggtaccgccaggctccagggaagcagcgcgagttggtcgcgactattgagagggatggtacaacaacctatgcagacaccgtgaagggccgattcttcatctccagagacaacaccaagaacacggtgactctacaaatgaacaacctaaaacctgatgacacagccatctattactgtaatgccctccggcactggggccaggggacccaggtcaccgtctcctca

SEQ ID NO: 1891 - DNA, 333 bp, synthetic construct
  source 1..333: mol_type = other DNA
gaggtgcagctggtggagtctgggggaggcttggtgcaggctggggagtctctgagactctcctgtgcagcctctggcagaagcttcagtacccttattatggcctggtaccgccaggctccagggaagcagcgcgagttggtcgcgactattgagagggatggtacaacaacctatgcagacaccgtgaagggccgattcttcatctccagagacaacaccaagaacacggtgactctacaaatgaacaacctaaaacctgatgacacagccatctattactgtaatgccctccggaactggggccaggggacccaggtcaccgtctcctca

SEQ ID NO: 1892 - DNA, 333 bp, synthetic construct
  source 1..333: mol_type = other DNA
gaggtgcagctggtggagtctgggggaggcttggtgcaggctggggggtctctgagactctcctgtgcagcctctggacgaagcttcagtacccttattatggcctggtaccgccaggctccagggaagcagcgcgagttggtcgcgacaattgagaggggtggtacggcaacctatacagactccgtgaagggccgattcttcatctccagagacaacgccaagaacacggtgactctgcacatgaacaacctgaaacctgaggacacagccatctattactgtaatgccctccgggactggggccaggggacccaggtcaccgtctcctca

SEQ ID NO: 1893 - DNA, 333 bp, synthetic construct
  source 1..333: mol_type = other DNA
gaggtgcagctggtggagtctgggggaggcttggtgcaggctggggggtctctgacactctcctgtgcagccgctggcagaaaattcagtacccttattatggcctggtaccgccaggctccagggaagcagcgcgagttggtcgcgactattgaaagggatggtacgacaagctatgaagactctgtgaagggccgattcttcatctccagagacaacgccaagaacacagtgactctgcaaatgaacaacctgaaacctgaggacacagccatctattactgtaatgccctccggctctggggccaggggacccaggtcaccgtctcctca

SEQ ID NO: 1894 - DNA, 333 bp, synthetic construct
  source 1..333: mol_type = other DNA
gaggtgcagctggtggagtctgggggaggcttggtgcaggctggggggtctctgagactctcctgtgcagcctctggcagaacgttcagtacccttattatggcttggtaccgccaggctccagggaagcagcgcgagttggtcgcgactattgagaggggtggtacgacaacctatgcagactccgtgaagggccgattctccatctccagagacaacgccaagaacacggtgactctgcaaatgaacaacctgaaacctgatgacaccgccatctattactgtaatgccctccggaactggggccaggggacccaggtcaccgtctcctca

SEQ ID NO: 1895 - DNA, 333 bp, synthetic construct
  source 1..333: mol_type = other DNA
gaggtgcagctggtggagtctgggggaggcttggtgcaggctggggggtctctgagactctcctgtgcagcctctggacgaagcttcagtacccttattatggcctggtaccgccaggctccagggaagcagcgcgagttggtcgcgactattgagagggatggtacgacaacctatacagactccgtggagggccgattcttcatctccagagacaacgccaagaacacggtgactctgcacatgaacaacctgaaacctgaggacacagccatctattactgtaatgccctccggtcctggggccaggggacccaggtcaccgtctcctca

SEQ ID NO: 1896 - DNA, 333 bp, synthetic construct
  source 1..333: mol_type = other DNA
gaggtgcagctggtggagtctgggggaggcttggtgcagcctggggggtctctgagactctcctgtgcagcctctggcagaagcttcagtacccttattatggcctggtaccgccaggctccaggggagcagcgcgagttggtcgcgactattgagagggacggtacgccaacctatacagactccgtgaagggccgattcttcatctccagagacaacgccaagaacacggtgactctgcaaatgaacaacctgaaacctgaggacacagccatctattactgtaatgccctccggtcctggggccaggggacccaggtcaccgtctcctca

SEQ ID NO: 1897 - DNA, 333 bp, synthetic construct
  source 1..333: mol_type = other DNA
gaggtgcagctggtggagtctgggggaagcttggtgcaggctggggggtctctgagactctcctgtgcagcctctggcagaagcttcagtacccttattatggcctggtaccgccaggctccagggaagcagcgcgagttggtcgcgactatagacagagatggtacgacaacctatgtagactccgtgaagggccgattcaccatatccagagacaacgccaagaacacggtgactctccaaatgaataatctgaaacctgaggacacagccgtctattactgtaatgccctccggcgctggggccaggggacccaggtcaccgtctcctca

SEQ ID NO: 1898 - DNA, 333 bp, synthetic construct
  source 1..333: mol_type = other DNA
gaggtgcagctggtggagtctgggggaggcttggtgcaggctggggggtctctgagactctcctgtgcagcctctggacgaaaattcagtacccttattatggcctggtaccgccaggctccagggaagcagcgcgagttggtcgcgactattgagagggatggtacgacaacctatgcagactccgtggagggccgattcttcatctccagagacaacgccaagaacacggtgactctgcaaatgaacaacctggaacctgaggactcagccacctattactgtaatgccctccggcactggggccaggggacccaggtcaccgtctcctca

SEQ ID NO: 1899 - DNA, 333 bp, synthetic construct
  source 1..333: mol_type = other DNA
gaggtgcagctggtggagtctgggggaggcttggtgcaggctggggagtctctgagactctcctgtgcagcctctggcagaagcttcagtacccttattatggcctggtaccgccaggctccagggaagcagcgcgagttggtcgcgactattgagagggatggtacaacaacctatgcagacaccgtgaagggccgattcttcatctccagagacaacaccaagaacacggtgactctacaaatgaacaacctaaaacctgatgacacagccatctattactgtaatgccctccgggactggggccaggggacccaggtcaccgtctcctca

SEQ ID NO: 1900 - DNA, 333 bp, synthetic construct
  source 1..333: mol_type = other DNA
gaggtgcagctggtggagtctgggggaggcttggtgcaggctggggggtctctgagactctcctgtgcagcctctggacgaagcttcagtacccttattatggcctggtaccgccaggctccagggtcgcagcgcgagttggtcgcgactattgaaagggatggtacgacaacctatgcagactccgtgaagggccgagtcttcatctccagagacaacgccaagaacacggtgactctgcaaatgaacaacctgaaacctgaggacacagccatctattactgcaatgccctccggcactggggccaggggacccaggtcaccgtctcctca

SEQ ID NO: 1901 - DNA, 333 bp, synthetic construct
  source 1..333: mol_type = other DNA
gaggtgcagctggtggagtctgggggaggcttggtgcaggctggggggtctctgagactctcctgtgcggcctctggcagaagcttcagtacccttattatggcctggtaccgccaggctccagggaagcagcgcgagttggtcgcgactattgagagggatggtacaacaacctgtgcagactccgtgaagggccgattcttcatctccagagacaacgccaagaacacggtgactctgcaaatgaacaacctgaaacctgatgacacagccatctattactgtaatgccctccggtgctggggccaggggacccaggtcaccgtctcctca

SEQ ID NO: 1902 - DNA, 333 bp, synthetic construct
  source 1..333: mol_type = other DNA
gaggtgcagctggtggagtctgggggaggcttggtgcaggctggggggtctctgagactctcctgtgcagcctctgggcgaagcttcagtacccttattatgggctggtaccgccaggctccagggaagcagcgcgagttggtcgcgactattgagcgggatggtacgacaacctatgcagacttcgtgaagggccgatttatcatctccagagacaacgccaagaacacggtgactctgcaaatgaacaacctgaaacctgatgacacagccatctattactgtaatgccctccggaactggggccaggggacccaggtcaccgtctcctca

SEQ ID NO: 1903 - DNA, 333 bp, synthetic construct
  source 1..333: mol_type = other DNA
gaggtgcagctggtggagtctgggggaggcttggtgcaggctggggggtctctgagactctcctgtgcagcctctggcagaagcttcagtaccctaattatggcctggtaccgccaggctccagggaagcagcgcgacttggtcgcgactattgagcgggatggtacgacaacctatgcagactccgtgaagggccgattcttcatctccagagacaacgccaagaacacggtgactctgcaaatgaacaacctgaaacctgaggacacagccatctattactgtaatgccctccggtcctggggccaggggacccaggtcaccgtctcctca

SEQ ID NO: 1904 - DNA, 333 bp, synthetic construct
  source 1..333: mol_type = other DNA
gaggtgcagctggtggagtctgggggaggcttggtgcaggctggggggtctctgagactctcctgtgcagcctctggcagaagcttcagtacccttattatggcctggtaccgccaggctccagggaagcagcgcgagagggtcgcgactattgaaagagatggtacgacaacctatgaggactccgtgaagggccgattcaccatatccagagacaacgccaagaacacggtgactctgcaaatgaataatctgaaacctgaggacacagccgtctattactgtaatgccctccgggactggggccaggggacccaggtcaccgtctcctca

SEQ ID NO: 1905 - DNA, 333 bp, synthetic construct
  source 1..333: mol_type = other DNA
gaggtgcagctggtggagtctgggggaggcttggtgcaggctggggggtctctgagactctcctgtgcagcctctggcagaagcttcagtacccttattatggcctggtaccgccaggctccagggaagcagcgcgagttggtcgcgactatagacagagatggtacgacaacctatgtagactccgtgaagggccgattcaccatatccagagacaacgccaagaacacggtgactctccaaatgaataatctgaaacctgaggacacagccgtctattactgtaatgccctccggcactggggccaggggacccaggtcaccgtctcctca

SEQ ID NO: 1906 - DNA, 333 bp, synthetic construct; identical to SEQ ID NO: 23
  source 1..333: mol_type = other DNA

SEQ ID NO: 1907 - DNA, 333 bp, synthetic construct
  source 1..333: mol_type = other DNA
gaggtgcagctggtggagtcagggggaggcttggtgcaggctggggggtctctgagactctcctgtgcagcctctggcagaaagttcagtacccttattatgggctggtaccgccaggctccagggaagcagcgcgagttggtcgcgactattgagagggatgatacgacaacctatgcagactccgtgaagggccgattcttcatctccagagacaacgccaagaacacggtgactctgcaaatgaacaacctgaaacctgaggacacagccatctattactgtaagaccctccggtactggggccaggggacccaggtcaccgtctcctca

SEQ ID NO: 1908 - DNA, 333 bp, synthetic construct
  source 1..333: mol_type = other DNA
gaggtgcagctggtggagtctgggggaggcttggtgcaggctggggggtctctgagactctcctgtgcagcctctggcagaaagttcagtacccttattatgggctggtaccgccaggctccagggaagcagcgcgagttggtcgcgactattgagagggatgatacgacaacctatgcggactccgtgaagggccgattcttcatctccagagacaacgccaagaacacggtgactctgcaaatgaacaacctgaaacctgaggacacagccatctattactgtactaccctccggtactggggccaggggacccaggtcaccgtctcctca

SEQ ID NO: 1909 - DNA, 333 bp, synthetic construct
  source 1..333: mol_type = other DNA
gaggtgcagctggtggagtctgggggaggcttggtgcaggctggggggtctctgagactctcctgtgcagcctctggcagaaaattcagtacccttattatggcctggtaccgccaggctgaagggaagcagcgcgagttggtcgcgactattgatagggatggtacgacaacctatgcagactccgtgaagggccgattcaccatctccagagacaacgccaagaacacggtgactctgcaaatgaacaacctgaaacctgaggacacagccgtttattactgtaagaccctccggtactggggccaggggacccaggtcaccgtctcctca

SEQ ID NO: 1910 - DNA, 333 bp, synthetic construct
  source 1..333: mol_type = other DNA
gaggtgcagctggtggagtctgggggaggcttggtgcaggctggggggtctctgagactctcctgtgcagtctctggacgaagcttcagtaccctgattatggcctggtaccgccaggctccagggaagcagcgcgagttggtcgcgactattgacaggggtggtacgacaaccgttacagactccgtgaagggccgattcttcatctccagagacaacgccaagaacacggtgactctgcaaatgaacaacctgaaacctgaggacacagccacgtattactgtaagaccctccggtactggggccaggggacccaggtcaccgtctcctca

SEQ ID NO: 1911 - DNA, 333 bp, synthetic construct
  source 1..333: mol_type = other DNA
gaggtgcagctggtggagtctgggggaggcttggtgcaggctggggggtctctgagactctcctgtgcagcctctggcagaaaattcagtacccttattatggcctggtaccgccaggctgaagggaagcagcgcgagttggtcgcgactattgatagggatggtacgacaacctatgcagactccgtgaagggccgattcaccatctccagagacaacgccaagaacacggtgactctgcaaatgaacaacctgaaacctgaggacacagccgtctattactgtagtaccctccggtactggggccaggggacccaggtcaccgtctcctca

SEQ ID NO: 1912 - DNA, 366 bp, synthetic construct
  source 1..366: mol_type = other DNA
gaggtgcagctggtggagtctgggggaggcttggcgcagcctggggggtctctgagactctcctgtgcagcctctggattcaccttcagtagctatgccatgagctgggtccgccagggtccaggaaaggggctcgagtgggtgtccggtatttatagtgacggtagtggtacatactatgcagattccgtgaagggccgattcaccatctccagagacaacgccaagaacacggtgtatctgcaaatgaacagcctgaaacctgaggacacggcactgtattactgtgcaaaagggaggcatagtggtagttactacccctgggatgagtactggggccaggggacccaggtcaccgtctcctca

SEQ ID NO: 1913 - DNA, 366 bp, synthetic construct
  source 1..366: mol_type = other DNA
gaggtgcagctggtggagtctgggggaggcttggcgcggcctggggggtctctgagactctcctgtgcagcctctggattcaccttcagtagctatgccatgagctgggtccgccagggtccaggaaaggggctcgagtgggtgtccggtatttatagtgatggtagtggtacatactatgcagattccgtgaagggccgattcaccatctccagagacaacgccaagaacacggtgtatctgcaaatgaacagcctgaaacctgaggacacggcactgtattactgtgcaaaagggaggcttagtggtagttactacccctgggatgagtactggggccaggggacccaggtcaccgtctcctca

SEQ ID NO: 1914 - DNA, 366 bp, synthetic construct
  source 1..366: mol_type = other DNA
gaggtgcagctggtggagtctgggggaggcttggcgcagcctggggggtctctgagactctcctgtgcagcctctggattcaccttcagttactatgccatgagctgggtccgccaggctccaggaaaggggctcgagtgggtgtccggtatttatagtgatggcagtggcacatactatgcagactccgtgaagggccgattcaccatctccagagacaacgccaagaacacggtgtatctgcaaatgaacagcctgaaacctgaggacacggcactgtattactgtgcaaaagggaggcatagtggtagttactacccctgggatgactactggggccaggggacccaggtcaccgtctcctca

SEQ ID NO: 1915 - DNA, 366 bp, synthetic construct
  source 1..366: mol_type = other DNA
gaggtgcagctggtggagtctgggggaggcttggcgcagcctggggggtctctgagactctcctgtgcagcctctggattcaccttcagtaactatgccatgagctgggtccgccaggctccaggaaaggggctcgagtgggtgtccggtatttatagtgatggtagtggcacatactatgcagactccgtgaagggccgattcaccatctccagagacaacgccaagaatacggtgtatctgcaaatgaacagcctgaaacctgaggacacggcactgtattactgtgcaaaagggaggaatagtggtagttactatccctgggatgactactggggccaggggacccaggtcaccgtctcctca

SEQ ID NO: 1916 - DNA, 366 bp, synthetic construct; identical to SEQ ID NO: 24
  source 1..366: mol_type = other DNA

SEQ ID NO: 1917 - DNA, 366 bp, synthetic construct
  source 1..366: mol_type = other DNA
gaggtgcagctggtggagtctgggggaggcttggcgcagcctggggggtctctgagactctcctgtgcagcctctggattcaccttcagtaactatgccatgagctgggcccgccaggctccaggaaaggggctcgagtgggtgtccggtatttatagtgatggtagtggcacatactatgcagactccgtgaagggccgattcaccatctccagagacaacgccaagaacacggtgtatctgcaaatgaacagcctgaaacctgaggacacggcactgtattactgtgcaaaagggaggggtagtggtagttactacccctgggatgaccactggggccaggggacccaggtcaccgtctcctca

SEQ ID NO: 1918 - DNA, 366 bp, synthetic construct
  source 1..366: mol_type = other DNA
gaggtgcagctggtggagtctgggggaggcttggcgcagcctggggggtctctgagactctcctgtgcagcctctggattcaccttcagtaactatgccatgagctgggtccgccaggctccaggaaaggggctcgagtgggtgtccggtatttatagtgatggtagtggcacatactatgcagactccgtgaagggccgattcaccatctccagagacaacgccaagaatacggtgtatctgcaaatgaacagcctgaaacctgaggacacggcactgtattactgtgcaaaagggaggaatagtggtagttactttccctgggatgactactggggccaggggacccaggtcaccgtctcctca

SEQ ID NO: 1919 - DNA, 366 bp, synthetic construct
  source 1..366: mol_type = other DNA
gaggtgcagctggtggagtctgggggaggcttggcgcagcctggggggtctctgagactctcctgtgcagcctctggattcacctttagtaactatgccatgagctgggtccgccaggctccaggaaaggggctcgagtgggtgtccggtatttatagtgatggtagtggtacatactatgcagactccgtgaagggccgattcaccatctccagagacaacgccaagaacacggtgtatctgcaaatgaacagcctgaaacctgaggacacggcactgtattactgtgcaaaagggaggcatagtggtagttactacccctgggatgagtactggggccaggggacccaggtcaccgtctcctca

SEQ ID NO: 1920 - DNA, 366 bp, synthetic construct
  source 1..366: mol_type = other DNA
gaggtgcagctggtggagtctgggggaggcttggcgcagcctggggggtctctgagactctcctgtgcagcctctggattcaccttcagtaactatgccatgagctgggcccgccaggctccaggaaaggggctcgagtgggtgtccggtatttatagtgatggtagtggcacatactatgcagactccgtgaagggccgattcaccatctccagagacaacgccaagaacacggtgtatctgcaaatgaacagcctgaaacctgaggacacggcactgtattactgtgcaaaagggaggggtagtggtagttacgacccctgggatgactactggggccaggggacccaggtcaccgtctcctca

SEQ ID NO: 1921 - DNA, 366 bp, synthetic construct
  source 1..366: mol_type = other DNA
gaggtgcagctggtggagtctgggggaggcttggcgcagcctggggggtctctgagactctcctgtgcagcctctggattcaccttcagtaactatgccatgagctgggcccgccaggctccaggaaaggggctcgagtgggtgtccggtatttatagtgatggtagtggcacatactatgcagactccgtgaagggccgattcaccatctccagagacaacgccaagaatacggtgtatctgcaaatgaacagcctgaaacctgaggacacggcactgtattactgtgcaaaagggaggaatagtggtagttactacccctgggatgagtactggggccaggggacccaggtcaccgtctcctca

SEQ ID NO: 1922 - DNA, 366 bp, synthetic construct
  source 1..366: mol_type = other DNA
gaggtgcagctggtggagtctgggggaggcttggcgcagcctggggggtctctgagactctcctgtgcagcctctggattcaccttcagtaactatgccatgagctgggcccgccaggctccaggaaaggggctcgagtgggtgtccggtatttatagtgatggtagtggcacatactatgcagactccgtgaagggccgattcaccatctccagagacaacgccaagaatacggtgtatctgcaaatgaacagcctgaaacctgaggacacggcactgtattactgtgcaaaagggaggaatagtggtagttacgatccctgggatgactattggggccaggggacccaggtcaccgtctcctca

SEQ ID NO: 1923 - DNA, 366 bp, synthetic construct
  source 1..366: mol_type = other DNA
gaggtgcagctggtggagtctgggggaggcttggcgcagcctggggggtctctgagactctcctgtgcagcctctggattcaccttcagtagctatgccatgagctgggtccgccagggtccaggaaaggggctcgagtgggtgtccggtatttatagtgatggtagtggtacatactatgcagattccgtgaagggccgattcaccatctccagagacaacgccaagaacacggtgtatctgcaaatgaacagcctgaaacctgaggacacggcactgtattactgtgcaaaagggaggcatagtggtagttacgacccctgggatgagtactggggccaggggacccaggtcaccgtctcctca

SEQ ID NO: 1924 - DNA, 366 bp, synthetic construct
  source 1..366: mol_type = other DNA
gaggtgcagctggtggagtctgggggaggcttggcgcagcctggggggtctctgagactctcctgtgcagcctctggattcaccttcagtaactatgccatgagctgggtccgccaggctccaggaaaggggctcgagtgggtgtccggtatttatagtgatggtagtgacacatactatgcagactccgtgaagggccgattcaccatctccagagacaacgccaagaatacggtgtatctgcaaatgaacagcctgaaacctgaggacacggcactgtattactgtgcaaaagggaggaatagtggtagttactatccctgggatgtctactggggccaggggacccaggtcaccgtctcctca

SEQ ID NO: 1925 - DNA, 366 bp, synthetic construct
  source 1..366: mol_type = other DNA
gaggtgcagctggtggagtctgggggaggcttggcgcagcctggggggtctctgagactctcctgtgcagcctctggattcaccttcagtaactatgccatgagctgggcccgccaggctccaggaaaggggctcgagtgggtgtccggtatttatagtgatggcagtggcacatactatgcagactccgtgaagggccgattcaccatctccagagacaacgccaagaacacggtgtatctgcaaatgaacagcctgaaacctgaggacacggcactgtattactgtgcaaaggggaggcatagtggtagttactacccctgggatgactactggggccaggggacccaggtcaccgtctcctca

SEQ ID NO: 1926 - DNA, 366 bp, synthetic construct
  source 1..366: mol_type = other DNA
gaggtgcagctggtggagtctgggggaggcttggcgcagcctggggggtctctgagactctcctgtgcagcctctggattcaccttcagtaactatgccatgagctgggcccgccaggctccaggaaaggggctcgagtgggtgtccggtatttatagtgatggtagtggcacatactatgcagactccgtgaagggccgattcaccatctccagagacaacgccaagaatacggtgtatctgcaaatgaacagcctgaaacctgaggacacggcactgtattactgtgcaaaagggaggaatagtggtagtttctatccctgggatgactattggggccaggggacccaggtcaccgtctcctca

SEQ ID NO: 1927 - DNA, 366 bp, synthetic construct
  source 1..366: mol_type = other DNA
gaggtgcagctggtggagtctgggggaggcttggcgcagcctggggggtctctgagactctcctgtgcagcctctggattcaccttcagtaactatgccatgagctgggcccgccaggctccaggaaaggggctcgagtgggtgtccggtatttatagtgatggtagtggcacatactatgcagactccgtgaagggccgattcaccatctccagagacaacgccaagaatacggtgtatctgcaaatgaacagcctgaaacctgaggacacggcactgtattactgtgcaaaagggaggaatagtggtagttactatgcctgggacgactactggggccaggggacccaggtcaccgtctcctca

SEQ ID NO: 1928 - DNA, 366 bp, synthetic construct
  source 1..366: mol_type = other DNA
gaggtgcagctggtggagtctgggggaggcttggcgcagcctggggggtctctgagactctcctgtgcagcctctggattcaccttcagtagctatgccatgagctgggtccgccagggtccaggaaaggggctcgagtgggtgtccggtatttatagtgatggtagtggtacatactatgcagattccgtgaagggccgattcaccatctccagagacaacgccaagaacacggtgtatctgcaaatgaacagcctgaaacctgaggacacggcactgtattactgtacaaaagggaggcatagtggtagttactacccctgggatgagtactggggccaggggacccaggtcaccgtctcctca

SEQ ID NO: 1929 - DNA, 366 bp, synthetic construct
  source 1..366: mol_type = other DNA
gaggtgcagctggtggagtctgggggaggcttggcgcagcctggggggtctctgagactctcctgtgcagcctctggattcacctttagtaactatgccatgagctgggtccgccaggctccaggaaaggggctcgagtgggtgtccggtatttatagtgatggtagtggtacatactatgcagactccgtgaagggccgattcaccatctccagagacaacgccaagaacacggtgtatctgcaaatgaacagcctgaaacctgaggacacggcactgtattactgtgcaaaagggaggcatagtggtagttactacccccgggatgagtactggggccaggggacccaggtcaccgtctcctca

SEQ ID NO: 1930 - DNA, 366 bp, synthetic construct
  source 1..366: mol_type = other DNA
gaggtgcagctggtggagtctgggggaggcttggcgcagcctggggggtctctgagactctcctgtgcagcctctggattcaccttcagtagctatgccatgagctgggtccgccagggtccaggaaaggggctcgagtgggtgtccggtatttatagtgatggtagtggtacatactatgcagattccgtgaagggccgattcaccatctccagagacaacgccaagaacacggtgtatctgcaaatgaacagcctgaaacctgaggacacggcactgtattactgtgcaaaagggaggcataggggtagttactacccctgggatgagtactggggccaggggacccaggtcaccgtctcctca

SEQ ID NO: 1931 - DNA, 366 bp, synthetic construct
  source 1..366: mol_type = other DNA
gaggtgcagctggtggagtctgggggaggcttggcgcagcctggggggtctctgagactctcctgtgcagcctctggattcaccttcagtaactatgccatgagctgggcccgccaggctccaggaaaggggctcgagtgggtgtccggtatttatagtgatggtagtggcacatactatgcagactccgtgaagggccgattcaccatctccagagacaacgccaagaatacggtgtatctgcaaatgaacagcctgaaacctgaggacacggctctgtattactgtgcaaaagggaggaatagtggtagtgactatccctgggatgactactggggccaggggacccaggtcaccgtctcctca

SEQ ID NO: 1932 - DNA, 366 bp, synthetic construct
  source 1..366: mol_type = other DNA
gaggtgcagctggtggagtctgggggaggcttggcgcagcctggggggtctctgagactctcctgtgcagcctctggattcaccttcagtaactatgccatgagctgggtccgccaggctccaggaaaggggctcgagtgggtgtccggtatttatagtgatggtagtggcacatactatgcagactccgtgaagggccgattcaccatctccagagacaacgccaagaatacggtgtatctgcaaatgaacagcctgaaacctgaggacacggcactgtattactgtgcaaaagggaggcatagtggtagttactacccctgggatgagcactggggccaggggacccaggtcaccgtctcctca

SEQ ID NO: 1933 - DNA, 366 bp, synthetic construct
  source 1..366: mol_type = other DNA
gaggtgcagctggtggagtctgggggaggcttggcgcagcctggggggtctctgagactctcctgtgcagcctctggattcaccttcagtagctatgccatgagctgggtccgccagggtccaggaaaggggctcgagtgggtgtccggtatttatagtgatggtagtggtacatactatgcagattccgtgaagggccgattcaccatctccagagacaacgccaagaacacggtgtatctgcaaatgaacagcctgaaacctgaggacacggcactgtattactgtgcaaaagggaggcatagtggtagttactacccctgggatgagcactggggccaggggacccaggtcaccgtctcctca

SEQ ID NO: 1934 - DNA, 366 bp, synthetic construct
  source 1..366: mol_type = other DNA
gaggtgcagctggtggagtctgggggaggcttggcgcagcctggggggtctctgagactctcctgtgcagcctctggattcaccttcagtaactatgccatgagctgggcccgccaggctccaggaaaggggctcgagtgggtgtccggtatttatagtgatggtagtggcacatactatgcagactccgtgaagggccgattcaccatctccagagacaacgccaagaacacggtgtatctgcaaatgaacagcctgaaacctgaggacacggcactgtattactgtgcaacagggaggggtagtggtagttactacccctgggatgactactggggccaggggacccaggtcaccgtctcctca

SEQ ID NO: 1935 - DNA, 366 bp, synthetic construct
  source 1..366: mol_type = other DNA
gaggtgcagctggtggagtctgggggaggcttggcgcagcctggggggtctctgagactctcctgtgcagcctctggattcaccttcagtaactatgccatgagctgggcccgccaggctccaggaaaggggctcgagtgggtgtccggtatttatagtgatggtagtggcacatactatgcagactccgtgaagggccgattcaccatctccagagacaacgccaagaatacggtgtatctgcaaatgaacagcctgaaacctgaggacacggcactgtattactgtgcaaaagggaggaatagtggtagttactatccctggggtgactattggggccaggggacccaggtcaccgtctcctca

SEQ ID NO: 1936 - DNA, 366 bp, synthetic construct
  source 1..366: mol_type = other DNA
gaggtgcagctggtggagtctgggggaggcttggcgcagcctggggggtctctgagactctcttgtgcagcctctggattcaccttcagtaactatgccatgagctgggcccgccaggctccaggaaaggggctcgagtgggtgtccggtatttatagtgatggtagtggcacatactatgcagactccgtgaagggccgattcaccatctccagagacaacgccaagaatacggtgtatctgcaaatgaacagcctgaaacctgaggacacggcactgtattactgtgcaaaagggaggaatagtggtggttactatccctgggatgactattggggccaggggacccaggtcaccgtctcctca

SEQ ID NO: 1937 - DNA, 366 bp, synthetic construct
  source 1..366: mol_type = other DNA
gaggtgcagctggtggagtctgggggaggcttggcgcagcctggggggtctctgagactctcctgtgcagcctctggattcaccttcagtaactatgccatgagctgggcccgccaggctccaggaaaggggctcgagtgggtgtccggtatttatggtgatggtagtggcacatactatgcggactccgtgaagggccgattcaccatctccagagacaacgccaagaacacggtgtatctgcaaatgaacagcctgaaacctgaggacacggcactgtattactgtgcaacagggaggggtagtggtagttactacccctgggatgactactggggccaggggacccaggtcaccgtctcctca

SEQ ID NO: 1938 - DNA, 366 bp, synthetic construct
  source 1..366: mol_type = other DNA
gaggtgcagctggtggagtctgggggaggcttggcgcagcctggggggtctctgagactctcgtgtgcagcctctggattcacctttagtaattatgccatgagctgggtccgccaggctccaggaaaggggctcgagtgggtgtccggtatttatagtgatggtagtggtacatactatgcagactccgtgaagggccgattcaccatctccagagacaacgccaagaacacggtgtatctgcaaatgaacagcctgaaacctgaggacacggctctgtattattgtgcaaacgggaggcatagtggtagttactacccctgggatgagtactggggccaggggacccaggtcaccgtctcctca

SEQ ID NO: 1939 - DNA, 366 bp, synthetic construct
  source 1..366: mol_type = other DNA
gaggtgcagctggtggagtctgggggaggcttggcgcagcctggggggtctctgagactctcctgtgcagcctctggattcacctttagtaactatgccatgagctgggtccgccaggctccaggaaaggggctcgagtgggtgtccggtatttatagtgatggtagtggtacatactatgcagactccgtgaagggccgattcaccatctccagagacaacgccaagaacacagtgtatctgcaaatgaacagcctgaaacctgaggacacggcactgtattactgtgcaaaagggagtcatagtggtagttactacccctgggatgagtactggggccaggggacccaggtcaccgtctcctca

SEQ ID NO: 1940 - DNA, 366 bp, synthetic construct
  source 1..366: mol_type = other DNA
gaggtgcagctggtggagtctgggggaggcttggcgcagcctggggggtctctgagactctcgtgtgcagcctctggattcacctttagtaattatgccatgagctgggtccgccaggctccaggaaaggggctcgagtgggtgtccggtatttatagtgatggtagtggtacatactatgcagactccgtgaagggccgattcaccatctccagagacaacgccaagaacacggtgtatctgcaaatgaacagcctgaaacctgaggacacggcactgtattattgtgcaaaagggaggcatggtggtagttactacccctgggatgagtactggggccaggggacccaggtcaccgtctcctca

SEQ ID NO: 1941 - DNA, 366 bp, synthetic construct
  source 1..366: mol_type = other DNA
gaggtgcagctggtggagtctgggggaggcttggcgcagcctggggggtctctgagactctcctgtgcagcctctggattcaccttcagtagctatgccatgagctgggtccgccagggtccaggaaaggggctcgagtgggtgtccggtatttatagtgatggtagtggtacatactatgcagattccgtgaagggccgattcaccatctccagagacaacgccaagaacacggtgtatctgcaaatgaacagcctgaaacctgaggacacggcactgtattactgttcaaaagggaggcatagtggtagttactacccctgggatgagtactggggccaggggacccaggtcaccgtctcctca

SEQ ID NO: 1942 - DNA, 366 bp, synthetic construct
  source 1..366: mol_type = other DNA
gaggtgcagctggtggagtctgggggaggcttggcgcagcctggggggtctctgagactctcctgtgcagcctctggattcaccttcagtaactatgccatgagctgggtccgccaggctccaggaaaggggctcgagtgggtgtccggtatttatagtgatggtagtggcacatactatgcagactccgtgaagggccgattcaccatctccagagacaacgccaagaatacggtgtatctgcaaatgaacagcctgaaacctgaggacacggcactgtattactgtgcaaaagggaggaatagtggtggttactatccctgggatgactactggggccaggggacccaggtcaccgtctcctca

SEQ ID NO: 1943 - DNA, 366 bp, synthetic construct
  source 1..366: mol_type = other DNA
gaggtgcagctggtggagtctgggggaggcttggcgcagcctggggggtctctgagactctcctgtgcagcctctggattcaccttcagtagctatgccatgagctgggtccgccagggtccaggaaaggggctcgagtgggtgtccggtatttatagtgatggtagtggtacatactatgcagattccgtgaagggccgattcaccatctccagagacaacgccaagaacacggtgtatctgcaaatgaacagcctgaaacctgaggacacggcactgtattactgtgcaaaagggaggcttagtggtagttactacccctgggatgagtactggggccaggggacccaggtcaccgtctcctca

SEQ ID NO: 1944 - DNA, 366 bp, synthetic construct
  source 1..366: mol_type = other DNA
gaggtgcagctggtggagtctgggggaggcttggcgcagcctggggggtctctgagactctcctgtgcagcctctggattcaccttcagtaactatgccatgagctgggcccgccaggctccaggaaaggggctcgagtgggtgtccggtatttatagtgatggtagtggcacatactatgcagactccgtgaagggccgattcaccatctccagagacaacgccaagaatacggtgtatctgcaaatgaacagcctgaaacctgaggacacggcactgtattactgtgcaaaagggaggaatagtggtagttactatacctgggatgactattggggccaggggacccaggtcaccgtctcctca

SEQ ID NO: 1945 - DNA, 366 bp, synthetic construct
  source 1..366: mol_type = other DNA
gaggtgcagctggtggagtctgggggaggcttggcgcagcctggggggtctctgagactctcctgtgcagcctctggattcacctttagtaactatgccatgagctgggtccgccaggctccagggaaggggctcgagtgggtgtccggtatttatagtgatggtagtggtacatactatgcagactccgtgaagggccgattcaccatctccagagacaacgccaagaacacggtgtatctgcaaatgaacagcctgaaacctgaggacacggcactgtattactgttcaaaagggaggcatagtggtagttactacccctgggatgagtactggggccaggggacccaggtcaccgtctcctca

SEQ ID NO: 1946 - DNA, 366 bp, synthetic construct
  source 1..366: mol_type = other DNA
gaggtgcagctggtggagtctgggggaggcttggcgcagcctggggggtctctgagactctcctgtgcagcctctggattcaccttcagtagctatgccatgagctgggtccgccagggtccaggaaaggggctcgagtgggtgtccggtatttatagtgatggtagtggtacatactatgcagattccgtgaagggccgattcaccatctccagagacaacgccaagaacacggtgtatctgcaaatgaacagcctgaaacctgaggacacggcactgtattactgtgcaaaagggaggcatagtggtagtgactacccctgggatgagtactggggccaggggacccaggtcaccgtctcctca

SEQ ID NO: 1947 - DNA, 366 bp, synthetic construct
  source 1..366: mol_type = other DNA
gaggtgcagctggtggagtctgggggaggcttggcgcagcctggggggtctctgagactctcctgtgcagcctctggattcaccttcagtaactatgccatgagctgggcccgccaggctccaggaaaggggctcgagtgggtgtccggtatttatagtgatggtagtggcacatactatgcagactccgtgaagggccgattcaccatctccagagacaacgccaagaatacggtgtatcttcaaatgaacagcctgaaacctgaggacacggcactgtattactgtgcaaaagggaggaatagtggtagttactatccctggtatgactattggggccaggggacccaggtcaccgtctcctca

SEQ ID NO: 1948 - DNA, 366 bp, synthetic construct
  source 1..366: mol_type = other DNA
gaggtgcagctggtggagtctgggggaggcttggcgcagcctggggggtctctgagactctcctgtgcagcctctggattcaccttcagtaactatgccatgagctgggcccgccaggctccaggaaaggggctcgagtgggtgtccggtatttatggtgatggtagtggcacatactatgcggactccgtgaagggccgattcaccatctccagagacaacgccaagaacacggtgtatctgcaaatgaacagcctgaaacctgaggacacggcactgtattactgtgcaaaagggaggggtagtggtagttactacccctgggataactactggggccaggggacccaggtcaccgtctcctca

SEQ ID NO: 1949 - DNA, 366 bp, synthetic construct
  source 1..366: mol_type = other DNA
gaggtgcagctggtggagtctgggggaggcttggcgcagcctggggggtctctgagactctcctgtgcagcctctggattcacctttagtaactatgccatgagctgggtccgccaggctccaggaaaggggctcgagtgggtgtccggtatttatagtgatggtagtggtacatactatgcagactccgtgaagggccgattcaccatctccagagacaacgccaagaacacagtgtatctgcaaatgaacagcctgaaacctgaggacacggcactgtattactgtgcaaaagggaggcatagtggtagttactacccctgggaggagtactggggccaggggacccaggtcaccgtctcctca

SEQ ID NO: 1950 - DNA, 366 bp, synthetic construct
  source 1..366: mol_type = other DNA
gaggtgcagctggtggagtctgggggaggcttggcgcagcctggggggtctctgagactctcctgtgcagcctctggattcaccttcagtagctatgccatgagctgggtccgccagggtccaggaaaggggctcgagtgggtgtccggtatttatagtgatggtagtggtacatactatgcagattccgtgaagggccgattcaccatctccagagacaacgccaagaacacggtgtatctgcaaatgaacagcctgaaacctgaggacacggcactgtattactgtgcaaacgggaggcatagtggtagttactacccctgggatgagtactggggccaggggacccaggtcaccgtctcctca

SEQ ID NO: 1951 - DNA, 366 bp, synthetic construct
  source 1..366: mol_type = other DNA
gaggtgcagctggtggagtctgggggaggcttggcgcagcctggggggtctctgagactctcctgtgcagcctctggattcacctttagtaactatgccatgagctgggtccgccaggctccaggaaaggggctcgagtgggtgtccggtatttatagtgatggtagtggtacatactatgcagactccgtgaagggccgattcaccatctccagagacaacgccaagaacacggtgtatctgcaaatgaacagcctgaaacctgaggacacggcactgtattactgtgcaaaagggaggcatagtggtagttacgacccctgggatgagtactggggccaggggacccaggtcaccgtctcctca

SEQ ID NO: 1952 - DNA, 366 bp, synthetic construct
  source 1..366: mol_type = other DNA
gaggtgcagctggtggagtctgggggaggcttggcgcagcctggggggtctctgagactctcctgtgcagcctctggattcaccttcagtagctatgccatgagctgggtccgccagggtccaggaaaggggctcgagtgggtgtccggtatttatagtgatggtagtggtacatactatgcagattccgtgaagggccgattcaccatctccagagacaacgccaagaacacggtgtatctgcaaatgaacagcctgaaacctgaggacacggcactgtattactgtgcaaaagggagtcatagtggtagttactacccctgggatgagtactggggccaggggacccaggtcaccgtctcctca

SEQ ID NO: 1953 - DNA, 366 bp, synthetic construct
  source 1..366: mol_type = other DNA
gaggtgcagctggtggagtctgggggaggcttggcgcagcctggggggtctctgagactctcctgtgcagcctctggattcaccttcagtaactatgccatgagctgggcccgccaggctccaggaaaggggctcgagtgggtgtccggtatttatagtgatggtagtggcacatactatgcagactccgtgaagggccgattcaccatctccagagacaacgccaagaatacggtgtatctgcaaatgaacagcctgaaacctgaggacacggcactgtattactgtgcaaaagggaggaatagtgttagttactatccctgggatgactactggggccaggggacccaggtcaccgtctcctca

SEQ ID NO: 1954 - DNA, 366 bp, synthetic construct
  source 1..366: mol_type = other DNA
gaggtgcagctggtggagtctgggggaggcttggcgcagcctggggggtctctgagactctcctgtgcagcctctggattcaccttcagtaactatgccatgagctgggtccgccaggctccaggaaaggggctcgagtgggtgtccggtatttatagtgatggtagtggcacatactctgcagactccgtgaagggccgattcaccatctccagagacaacgccaagaacacggtgtatctgcaaatgaacagcctgaaacctgacgacacggcactgtattactgtgcaaaagggaaacatagtggtagttactacccctgggatgagtactggggccaggggacccaggtcaccgtctcctca

SEQ ID NO: 1955 - DNA, 366 bp, synthetic construct
  source 1..366: mol_type = other DNA
gaggtgcagctggtggagtctgggggaggcttggcgcagcctggggggtctctgagactctcctgtgcagcctctggattcaccttcagtaactatgccatgagctgggcccgccaggctccaggaaaggggctcgagtgggtgtccggtatttatagtgatggtagtggcacatactatgcagactccgtgaagggccgattcaccatctccagagacaacgccaagaatacggtgtatctgcaaatgaacagcctgaaacctgaggacacggcactgtattactgtgcaaaagggaggaatagaggtagttactatccctgggatgactattggggccaggggacccaggtcaccgtctcctca

SEQ ID NO: 1956 - DNA, 366 bp, synthetic construct
  source 1..366: mol_type = other DNA
gaggtgcagctggtggagtctgggggaggcttggcgcagcctggggggtctctgagactctcctgtgcagcctctggattcaccttcagtaactatgccatgagctgggcccgccaggctccaggaaaggggctcgagtgggtgtccggtatttatagtgatggtagtggaacatactatgcagactccgtgaagggccgattcaccatctccagagacaacgccaagaatacggtgtatctgcaaatgaacagcctgaaacctgaggacacggcactgtattactgtgcaaaagggaggaatagtggtagttactatcactgggatgactactggggccaggggacccaggtcaccgtctcctca

SEQ ID NO: 1957 - DNA, 366 bp, synthetic construct
  source 1..366: mol_type = other DNA
gaggtgcagctggtggagtctgggggaggcttggcgcagcctggggggtctctgagactctcctgtgcagcctctggattcaccttcagtagctatgccatgagctgggtccgccagggtccaggaaaggggctcgagtgggtgtccggtatttatagtgatggtagtggtacatactatgcagattccgtgaagggccgattcaccatctccagagacaacgccaagaacacggtgtatctgcaaatgaacagcctgaaacctgaggacacggcactgtattactgtgcaacagggaggcatagtggtagttactacccctgggatgagtactggggccaggggacccaggtcaccgtctcctca

SEQ ID NO: 1958 - DNA, 366 bp, synthetic construct
  source 1..366: mol_type = other DNA
gaggtgcagctggtggagtctgggggaggcttggcgcagcctggggggtctctgagactctcctgtgcagcctctggattcaccttcagtagctatgccatgagctgggtccgccagggtccaggaaaggggctcgagtgggtgtccggtatttatagtgatggtagtggtacatactatgcagattccgtgaagggccgattcaccatctccagagacaacgccaagaacacggtgtatctgcaaatgaacagcctgaaacctgaggacacggcactgtattactgtgcaaaagggaggcatagtggtagttactacccctgggaagagtactggggccaggggacccaggtcaccgtctcctca

SEQ ID NO: 1959 - DNA, 366 bp, synthetic construct
  source 1..366: mol_type = other DNA
gaggtgcagctggtggagtctgggggaggcttggcgcagcctggggggtctctgagactctcctgtgcagcctctggattcaccttcagtaactatgccatgagctgggcccgccaggctccaggaaaggggctcgagtgggtgtccggtatttatagtgatggtagtggcacatactatgcagactccgtgaagggccgattcaccatctccagagacaacgccaagaatacggtgtatctgcaaatgaacagcctaaaacctgaggacacggcactgtattactgtgcaaaagggaggaatagtggtagttactatccctgggatggctactggggccaggggacccaggtcaccgtctcctca

SEQ ID NO: 1960 - DNA, 366 bp, synthetic construct
  source 1..366: mol_type = other DNA
gaggtgcagctggtggagtctgggggaggcttggcgcagcctggggggtctctgagactctcctgtgcagcctctggattcacctttagtaactatgccatgagctgggtccgccaggctccaggaaaggggctcgagtgggtgtccggtatttatagtgatggtagtggtacatactatgcagactccgtgaagggccgattcaccatctccagagacaacgccaagaacacggtgtatctgcaaatgaacagcctgaaacctgaggacacggcactgtattactgtgcaaaagggaggcatagtggtagtgactacccctgggatgagtactggggccaggggacccaggtcaccgtctcctca

SEQ ID NO: 1961 - DNA, 366 bp, synthetic construct
  source 1..366: mol_type = other DNA
gaggtgcagctggtggagtctgggggaggcttggcgcagcctggggggtctctgagactctcctgtgcagcctctggattcaccttcagtaactatgccatgagctgggcccgccaggctccaggaaaggggctcgagtgggtgtccggtatttatagtgatggtagtggcacatactatgcagactccgtgaagggccgattcaccatctccagagacaacgccaagaacacggtgtatctgcaaatgaacagcctgaaacctgaggacacggcactgtattactgtgcaaaagggaggggtagtggtagttactacccctgggatggctactggggccaggggacccaggtcaccgtctcctca

SEQ ID NO: 1962 - DNA, 366 bp, synthetic construct
  source 1..366: mol_type = other DNA
gaggtgcagctggtggagtctgggggaggcttggcgcagcctggggggtctctgagactctcctgtgcagcctctggattcaccttcagtaactatgccatgagctgggcccgccaggctccaggaaaggggctcgagtgggtgtccggtatttatagtgatggtagtggcacatactatgcagactccgtgaagggccgattcaccatctccagagacaacgccaagaatacggtgtatctgcaaatgaacagcctgaaacctgaggacacggcactgtattactgtgcaaaagtgaggaatagtggtagttactatccctgggatgactattggggccaggggacccaggtcaccgtctcctca

SEQ ID NO: 1963 - DNA, 366 bp, synthetic construct
  source 1..366: mol_type = other DNA
gaggtgcagctggtggagtctgggggaggcttggcgcagcctggggggtctctgagactctcctgtgcagcctctggattcaccttcagtaactatgccatgagctgggtccgccaggctccaggaaaggggctcgagtgggtgtccggtatttatagtgatggtagtggcacatactatgcagactccgtgaagggccgattcaccatctccagagacaacgccaagaatacggtgtatctgcaaatgaacagcctgaaacctgaggacacggcactgtattactgtgcaaaagtgaggaatagtggtagttactatccctgggatgactactggggccaggggacccaggtcaccgtctcctca

SEQ ID NO: 1964 - DNA, 366 bp, synthetic construct
  source 1..366: mol_type = other DNA
gaggtgcagctggtggagtctgggggaggcttggcgcagcctggggggtctctgagactctcctgtgcagcctctggattcaccttcagtaactatgccatgagctgggcccgccaggctccaggaaaggggctcgagtgggtgtccggtatttatagtgatggtagcggcacatactatgcagactccgtgaagggccgattcaccatctccagagacaacgccaagaacacggtgtatctgcaaatgaacagcctcaaacctgaggacacggcactgtattactgtgcaaaagggaggggtagtggtagttactacccctgggaagactactggggccaggggacccaggtcaccgtctcctca

SEQ ID NO: 1965 - DNA, 366 bp, synthetic construct
  source 1..366: mol_type = other DNA
gaggtgcagctggtggagtctgggggaggcttggcgcagcctggggggtctctgagactctcctgtgcagcctctggattcaccttcagtaactatgccatgagctgggcccgccaggctccaggaaaggggctcgagtgggtgtccggtatttatagtgatggtagtggcacatactatgcagactccgtgaagggccgattcaccatctccagagacaacgccaagaatacggtgtatctgcaaatgaacagcctgaaacctgaggacacggcactgtattactgtgcaaaagggaggaatagtggtagttactatccctgggaggactactggggccaggggacccaggtcaccgtctcctca

SEQ ID NO: 1966 - DNA, 366 bp, synthetic construct
  source 1..366: mol_type = other DNA
gaggtgcagctggtggagtctgggggaggcttggcgcagcctggggggtctctgagactctcctgtgcagcctctggattcaccttcagtaactatgccatgagctgggcccgccaggctccaggaaaggggctcgagtgggtgtccggtatttatagtgatggtagtggcacatactatgcagactccgtgaagggccgattcaccatctccagagacaacgccaagaacacggtgtatctgcaaatgaacagcctgaaacctgaggacacggcactgtattactgtgcaaaagggaggcatagtggtagttactacccctgggatgagtactggggccaggggacccaggtcaccgtctcctca

SEQ ID NO: 1967 - DNA, 366 bp, synthetic construct
  source 1..366: mol_type = other DNA
gaggtgcagctggtggagtctgggggaggcttggtgcagcctggggggtctctgagactctcctgtgcagcctctggattcaccttcagtagctatgccatgagctgggtccgccagggtccaggaaaggggctcgagtgggtgtccggtatttatagtgatggtagtggtacatactatgcagattccgtgaagggccgattcaccatctccagagacaacgccaagaacacggtgtatctgcaaatgaacagcctgaaacctgaggacacggcactgtattactgtgcaaaagggaggcttagtggtagttactacccctgggatgagtactggggccaggggacccaggtcaccgtctcctca

SEQ ID NO: 1968 - DNA, 366 bp, synthetic construct
  source 1..366: mol_type = other DNA
gaggtgcagctggtggagtctgggggaggcttggcgcagcctggggggtctctgagactctcctgtgcagcctctggattcacctttagtaactatgccatgagctgggcccgccaggctccaggaaaggggctcgagtgggtgtccggtatttatagtgatggtagtggtacatactatgcagactccgtgaagggccgattcaccatctccagagacaacgccaagaacacggtgtatctgcaaatgaacagcctgaaacctgaggacacggcactgtattactgtgcaaaagggaggcatagtggtagttacgacccctgggatgagtactggggccaggggacccaggtcaccgtctcctca

SEQ ID NO: 1969 - DNA, 366 bp, synthetic construct
  source 1..366: mol_type = other DNA
gaggtgcagctggtggagtctgggggaggcttggcgcagcctggggggtctctgagactctcctgtgcagcctctggattcaccttcagtaactatgccatgagctgggcccgccaggctccaggaaaggggctcgagtgggtgtccggtatttatagtgatggtagtggcacatactatgcagactccgtgaagggccgattcaccatctccagagacaacgccaagaacacggtgtatctgcaaatgaacagcctgaaacctgaggacacggcactgtattactgtgcaaaagggtggggtagtggtagttactacccctgggatgactactggggccaggggacccaggtcaccgtctcctca

SEQ ID NO: 1970 - DNA, 366 bp, synthetic construct
  source 1..366: mol_type = other DNA
gaggtgcagctggtggagtctgggggaggcttggcgcagcctggggggtctctgagactctcctgtgcagcctctggattcaccttcagtagctatgccatgagctgggtccgccagggtccaggaaaggggctcgagtgggtgtccggtatttatagtgatggtagtggtacatactatgcagattccgtgaagggccgattcaccatctccagagacaacgccaagaacacggtgtatctgcaaatgaacagcctgaaacctgaggacacggcactgtattactgtgcaaaagtgaggcatagtggtagttactacccctgggatgagtactggggccaggggacccaggtcaccgtctcctca

SEQ ID NO: 1971 - DNA, 366 bp, synthetic construct
  source 1..366: mol_type = other DNA
gaggtgcagctggtggagtctgggggaggcttggcgcagcctggggggtctctgagactctcctgtgcagcctctggattcaccttcagtagctatgccatgagctgggtccgccagggtccaggaaaggggctcgagtgggtgtccggtatttatagtgatggtagtggtacatactatgcagattccgtgaagggccgattcaccatctccagagacaacgccaagaacacggtgtatctgcaaatgaacagcctgaaacctgaggacacggcactgtattactgtgcaaaagggaggcatagtggtagttactacccccgggatgagtactggggccaggggacccaggtcaccgtctcctca

SEQ ID NO: 1972 - DNA, 366 bp, synthetic construct
  source 1..366: mol_type = other DNA
gaggtgcagctggtggagtctgggggaggcttggcgcagcctggggggtctctgagactctcctgtgcagcctctggattcaccttcagtagctatgccatgagctgggtccgccagggtccaggaaaggggctcgagtgggtgtccggtatttatagtgatggtagtggtacatactatgcagattccgtgaagggccgattcaccatctccagagacaacgccaagaacacggtgtatctgcaaatgaacagcctgaaacctgaggacacggcactgtattactgtgcaaaagggaggcatagtggtcgttactacccctgggatgagtactggggccaggggacccaggtcaccgtctcctca

SEQ ID NO: 1973 - DNA, 366 bp, synthetic construct
  source 1..366: mol_type = other DNA
gaggtgcagctggtggagtctgggggaggcctggcgcagcctggggggtctctgagactctcctgtgcagcctctggattcaccttcagtaactatgccatgagctgggcccgccaggctccagggaaggggctcgagtgggtgtccggtatttatagtgatggtagtggcacatactatgcagactccgtgaagggccgattcaccatctccagagacaacgccaagaatacggtgtatctgcaaatgaacagcctgaaacctgaggacacggcactgtattactgtgcaaaagggaggaatagtggtagtcactatccctgggatgactattggggccaggggacccaggtcaccgtctcctca

SEQ ID NO: 1974 - DNA, 366 bp, synthetic construct
  source 1..366: mol_type = other DNA
gaggtgcagctggtggagtctgggggaggcttggcgcagcctggggggtctctgagactctcctgtgcagcctctggattcaccttcagtaactatgccatgagctgggcccgccaggctccaggaaaggggctcgagtgggtgtccggtatttatagtgatggtagtggcacatactatgcagactccgtgaagggccgattcaccatctccagagacaacgccaagaacacggtgtatctgcaaatgaacagcctgaaacctgaggacacggcactgtattactgtgcaaaagggaggggtagtggtagttaccacccctgggatgactactggggccaggggacccaggtcaccgtctcctca

SEQ ID NO: 1975 - DNA, 366 bp, synthetic construct
  source 1..366: mol_type = other DNA
gaggtgcagctggtggagtctgggggaggcttggcgcagcctggggggtctctgagactctcctgtgcagcctctggattcaccttcagtaactatgccatgagctgggcccgccaggctccaggaaaggggctcgagtgggtgtccggtatttatagtgatggtagtggcacatactatgcagactccgtgaagggccgattcaccatctccagagacaacgccaagaacacggtgtatctgcaaatgaacagcctgaaacctgaggacacggcactgtattactgtgcaaaagggagtggtagtggtagttactacccctgggatgactactggggccaggggacccaggtcaccgtctcctca

SEQ ID NO: 1976 - DNA, 366 bp, synthetic construct
  source 1..366: mol_type = other DNA
gaggtgcagctggtggagtctgggggaggcttggcgcagcctggggggtctctgagactctcctgtgcagcctctggattcaccttcagtaactatgccatgagctgggcccgccaggctccaggaaaggggctcgagtgggtgtccggtatttatggtgatggtagtggcacatactatgcggactccgtgaagggccgattcaccatctccagagacaacgccaagaacacggtgtatctgcaaatggacagcctgaaacctgaggacacggcactgtattactgtgcaaaagggaggggtagtggtggttactacccctgggatgactactggggccaggggacccaggtcaccgtctcctca

SEQ ID NO: 1977 - DNA, 366 bp, synthetic construct
  source 1..366: mol_type = other DNA
gaggtgcagctggtggagtctgggggaggcttggcgcagcctggggggtctctgagactctcctgtgcagcctctggattcacctttagtaactatgccatgagctgggtccgccaggctccaggaaaggggctcgagtgggtgtccggtatttatagtgatggtagtggtacatactatgcagactccgtgaagggccgattcaccatctccagagacaacgccaagaacacggtgtatctgcaaatgaacagcctgaaacctgaggacacggcactgtattactgtgcaaaagggaggcatagtgttagttactacccctgggatgagtactggggccaggggacccaggtcaccgtctcctca

SEQ ID NO: 1978 - DNA, 366 bp, synthetic construct
  source 1..366: mol_type = other DNA
gaggtgcagctggtggagtctgggggaggcttggcgcagcctggggggtctctgagactctcctgtgcagcctctggattcacctttagtaactatgccatgagctgggtccgccaggctccaggaaaggggctcgagtgggtgtccggtatttatagtgatggtagtggtacttactatgcagactccgtgaagggccgattcaccatctccagagacaacgccaagaacacggtgtatctgcaaatgaacagcctgaaacctgaggacacggcactgtattactgtgcaaaagggaggcttagtggtagttactacccctgggatgagtactggggccaggggacccaggtcaccgtctcctca

SEQ ID NO: 1979 - DNA, 366 bp, synthetic construct
  source 1..366: mol_type = other DNA
gaggtgcagctggtggagtctgggggaggcttggcgcagcctggggggtctctgagactctcctgtgcagcctctggattcaccttcagtaactatgccatgagctgggcccgccaggctccaggaaaggggctcgagtgggtgtccggtatttatagtgatggtagtggcacatactatgcagactccgtgaagggccgattcaccatctccagagacaacgccaagaatacggtgtatctgcaaatgaacagcctgaaacctgaggacacggcactgtattactgtgcaaaagggaggaatagtggtagttactttccctgggatgactattggggccaggggacccaggtcaccgtctcctca

SEQ ID NO: 1980 - DNA, 366 bp, synthetic construct
  source 1..366: mol_type = other DNA
gaggtgcagctggtggagtctgggggaggcttggcgcagcctggggggtctctgagactctcctgtgcagcctctggattcaccttcagtaactatgccatgagctgggcccgccaggctccaggaaaggggctcgagtgggtgtccggtatttatagtgatggtagtggcacatactatgcagactccgtgaagggccgattcaccatctccagagacaacgccaagaatacggtgtatctgcaaatgaacagcctgaaacctgaggacacggcactgtattactgtgcaaaagggaggaatagtggtaggtactatccctgggatgactattggggccaggggacccaggtcaccgtctcctca

SEQ ID NO: 1981 - DNA, 366 bp, synthetic construct
  source 1..366: mol_type = other DNA
gaggtgcagctggtggagtctgggggaggcttggcgcagcctggggggtctctgagactctcctgtgcagcctctggattcaccttcagtaactatgccatgagctgggcccgccaggctccaggaaaggggctcgagtgggtgtccggtatttatggtgatggtagtggcacatactatgcggactccgtgaagggccgattcaccatctccagagacaacgccaagaacacggtgtatctgcaaatgaacagcctgaaacctgaggacacggcactgtattactgtgcaaaagggaggggtagtggtagttacgacccctgggatgactactggggccaggggacccaggtcaccgtctcctca

SEQ ID NO: 1982 - DNA, 366 bp, synthetic construct
  source 1..366: mol_type = other DNA
gaggtgcagctggtggagtctgggggaggcttggcgcagcctggggggtctctgagactctcctgtgcagcctctggattcaccttcagtagctatgccatgagctgggtccgccagggtccaggaaaggggctcgagtgggtgtccggtatttatagtgatggtagtggtacatactatgcagattccgtgaagggccgattcaccatctccagagacaacgccaagaacacggtgtatctgcaaatgaacagcctgaaacctgaggacacggcactgtattactgtgcaaaagggaggcatagtggtagttactacccctggtatgagtactggggccaggggacccaggtcaccgtctcctca

SEQ ID NO: 1983 - DNA, 366 bp, synthetic construct
  source 1..366: mol_type = other DNA
gaggtgcagctggtggagtctgggggaggcttggcgcagcctggggggtctctgagactctcctgtgcagcctctggattcaccttcagtaactatgccatgagctgggcccgccaggctccaggaaaggggctcgagtgggtgtccggtatttatagtgatggtagtggcacatactatgcagactccgtgaagggccgattcaccatctccagagacaacgccaagaacacggtgtatctgcaaatgaacagcctgaaacctgaggacacggcactgtattactgtgcaaaagggaggggtagtggtagttactacccctgggatgcctactggggccaggggacccaggtcaccgtctcctca

SEQ ID NO: 1984 - DNA, 366 bp, synthetic construct
  source 1..366: mol_type = other DNA
gaggtgcagctggtggagtctgggggaggcttggcgcagcctggggggtctctgagactctcctgtgcagcctctggattcaccttcagttactatgccatgagctgggtccgccaggctccaggaaaggggctcgagtgggtgtccggtatttatagtgatggcagtggcacatactatgcagactccgtgaagggccgattcaccatctccagagacaacgccaagaacacggtgtatctgcaaatgaacagcctgaaacctgaggacacggcactgtattactgtgcaaaagggaggcatagtggtagttcctacccctgggatgactactggggccaggggacccaggtcaccgtctcctca

SEQ ID NO: 1985 - DNA, 366 bp, synthetic construct
  source 1..366: mol_type = other DNA
gaggtgcagctggtggagtctgggggaggcttggcgcagcctggggggtctctgagactctcctgtgcagcctctggattcaccttcagtaactatgccatgagctgggcccgccaggctccaggaaaggggctcgagtgggtgtccggtatttatagtgatggtagtggcacatactatgcagactccgtgaagggccgattcaccatctccagagacaacgccaagaacacggtgtatctgcaaatgaacagcctgaaacctgaggacacggcactgtattactgtgcaaaagggaggcatagtggtagttactaccccttggatgactactggggccaggggacccaggtcaccgtctcctca

SEQ ID NO: 1986 - DNA, 366 bp, synthetic construct
  source 1..366: mol_type = other DNA
gaggtgcagctggtggagtctgggggaggcctggcgcagcctggggggtctctgagactctcctgtgcagcctctggattcaccttcagttactatgccatgagctgggtccgccaggctccaggaaaggggctcgagtgggtgtccggtatttatagtgatggcagtggcacatactatgcagactccgtgaagggccgattcaccatctccagagacaacgccaagaacacggtgtatctgcaaatgaacagcctgaaacctgaggacacggcactgtattactgtgcaaaagggaggcatagtggtagttactacccccgggatgactactggggccaggggacccaggtcaccgtctcctca

SEQ ID NO: 1987 - DNA, 366 bp, synthetic construct
  source 1..366: mol_type = other DNA
gaggtgcagctggtggagtctggggggggcttggcgcagcctggggggtctctgagactctcctgtgcagcctctggattcaccttcagtaactatgccatgagctgggcccgccaggctccaggaaaggggctcgagtgggtgtccggtatttatagtgatggtagtggcacatactatgcagactccgtgaagggccgattcaccatctccagagacaacgccaagaacacggtgtatctgcaaatgaacagcctgaaacctgaggacacggcactgtattactgtgcaaaagggaggcatagtggtagttacgacccctgggatgactactggggccaggggacccaggtcaccgtctcctca

SEQ ID NO: 1988 - DNA, 366 bp, synthetic construct
  source 1..366: mol_type = other DNA
gaggtgcagctggtggagtctgggggaggcttggcgcagccaggggggtctctgagactctcctgtgcagcctctggattcaccttcagttactatgccatgagctgggtccgccaggctccaggaaaggggctcgagtgggtgtccggtatttatagtgatggcagtggcacatactatgcagactccgtgaagggccgattcaccatctccagagacaacgccaagaacacggtgtatctgcaaatgaacagcctgaaacctgaggacacggcactgtattactgtgcaaacgggaggcatagtggtagttactacccctgggatgactactggggccaggggacccaggtcaccgtctcctca

SEQ ID NO: 1989 - DNA, 366 bp, synthetic construct
  source 1..366: mol_type = other DNA
gaggtgcagctggtggagtctgggggaggcttggcgcagcctggggggtctctgagactctcctgtgcagcctctggattcaccttcagtaactatgccatgagctgggcccgccaggctccaggaaaggggctcgagtgggtgtccggtatttatagtgatggtagtggcacatactatgcagactccgtgaagggccgattcaccatctccagagacaacgccaagaacacggtgtatctgcaaatgaacagcctgaaacctgaggacacggcactgtattactgtgcaaaagggaggcatagtggtagttactacccctgggaggactactggggccaggggacccaggtcaccgtctcctca

SEQ ID NO: 1990 - DNA, 366 bp, synthetic construct
  source 1..366: mol_type = other DNA
gaggtgcagctggtggagtctgggggaggcttggcgcagcctggggggtctctgagactctcctgtgcagcctctggattcaccttcagttactatgccatgagctgggtccgccaggctccaggaaaggggctcgagtgggtgtccggtatttatagtgatggcagtggcacatactatgcagactccgtgaagggccgattcaccatctccagagacaacgccaagaacacggtgtatctgcaaatgaacagccttaaacctgaggacacggcactgtattactgtgcaaaagggaggcatagtggtagttactacccctggtatgactactggggccaggggacccaggtcaccgtctcctca

SEQ ID NO: 1991 - DNA, 366 bp, synthetic construct
  source 1..366: mol_type = other DNA
gaggtgcagctggtggagtctgggggaggcttggtgcaacctggggggtctctgagactctcctgtgcagcctctggattcaccttcagtaactatgccatgagctgggtccgccaggctccaggaaaggggctcgagtgggtgtccggtatttatagtgatggtagtggcacatactctgcagactccgtgaagggccgattcaccatctccagagacaacgccaagaacacggtgtatctgcaaatgaacagcctgaaacctgacgacacggcactgtattactgtgcaaaagggaaacatagtggtagttactacccctgggatgactactggggccaggggacccaggtcaccgtctcctca

SEQ ID NO: 1992 - DNA, 366 bp, synthetic construct
  source 1..366: mol_type = other DNA
gaggtgcagctggtggagtctgggggaggcttggcgcagcctggggggtctctgagactctcctgtgcagcctctggattcaccttcagtaactatgccatgagctgggcccgccaggctccaggaaaggggctcgagtgggtgtccggtatttatagtgatggtagtggcacatactatgcagactccgtgaagggccgattcaccatctccagagacaacgccaagaacacggtgtatctgcaaatgaacagcctgaaacctgaggacacggcactgtattactgtgcaaaagggaggcatagtggtagttactacccctgggatgaccactggggccaggggacccaggtcaccgtctcctca

SEQ ID NO: 1993 - DNA, 366 bp, synthetic construct
  source 1..366: mol_type = other DNA
gaggtgcagctggtggagtctgggggaggcttggcgcagcctggggggtctctgagactctcctgtgcagcctctggattcaccttcagtaactatgccatgagctgggcccgccaggctccaggaaaggggctcgagtgggtgtccggtatttatagtgatggtagtggcacatactatgcagactccgtgaagggccgattcaccatctccagagacaacgccaagaacacggtgtatctgcaaatgaacagcctgaaacctgaggacacggcactgtattactgtgcaaaagggaggcatagtggtagttactaccccagggatgactactggggccaggggacccaggtcaccgtctcctca

SEQ ID NO: 1994 - DNA, 366 bp, synthetic construct
  source 1..366: mol_type = other DNA
gaggtgcagctggtggagtctgggggaggcttggcgcagcctggggggtctctgagactctcctgtgcagcctctggattcaccttcagtaactatgccatgagctgggtccgccaggctccaggaaaggggctcgagtgggtgtccggtatttatagtgatggtagtggcacatactctgcagactccgtgaagggccgattcaccatctccagagacaacgccaagaacacggtgtatctgcaaatgaacagcctgaaacctgacgacacggcactgtattactgtgcaaaagggaaacatagtggtagttactacccctgggatgactactggggccaggggacccaggtcaccgtctcctca

SEQ ID NO: 1995 - DNA, 366 bp, synthetic construct
  source 1..366: mol_type = other DNA
gaggtgcagctggtggagtctgggggaggcttggcgcagcctggggggtctctgagactctcctgtgcaacctctggattcaccttcagtaactatgccatgagctgggtccgccaggctccaggaaaggggctcgagtgggtgtccggtatttatagtgatggtagtggcacatactctgcagactccgtgaagggccgattcaccatctccagagacaacgccaagaacacggtgtatctgcaaatgaacagcctgaaacctgacgacacggcactgtattactgtgcaaaagggaaacatagtggtagttactacccctgggatgactactggggccaggggacccaggtcaccgtctcctca

SEQ ID NO: 1996 - DNA, 366 bp, synthetic construct
  source 1..366: mol_type = other DNA
gaggtgcagctggtggagtctgggggaggcttggcgcagcctggggggtctctgagactctcctgtgcagcctctggattcaccttcagttactatgccatgagctgggtccgccaggctccaggaaaggggctcgagtgggtgtccggtatttatagtgatggcagcggcacatactatgcagactccgtgaagggccgattcaccatctccagagacaacgccaagaacacggtgtatctgcaaatgaacagcctgaaacctgaggacacggcactgtattactgtgcaaaagggaggcatagtggtagttactacccctgggatgaccactggggccaggggacccaggtcaccgtctcctca

SEQ ID NO: 1997 - DNA, 366 bp, synthetic construct
  source 1..366: mol_type = other DNA
gaggtgcagctggtggagtctgggggaggcttggcgcagcctggggggtctctgagactctcctgtgcagcctctggattcaccttcagttactatgccatgagctgggtccgccaggctccaggaaaggggctcgagtgggtgtccggtatttatagtgatggcagtggcacatactacgcggactccgtgaagggccgattcaccatctccagagacaacgccaagaacacggtgtatctgcaaatgaacagcctgaaacctgaggacacggcactgtattactgtgcaaaagtgaggcatagtggtagttactacccctgggatgactactggggccaggggacccaggtcaccgtctcctca

SEQ ID NO: 1998 - DNA, 366 bp, synthetic construct
  source 1..366: mol_type = other DNA
gaggtgcagctggtggagtctgggggaggcttggcgcagcctggggggtctctgagactctcctgtgcagcctctggattcaccttcagttactatgccatgagctgggtccgccaggctccaggaaaggggctcgagtgggtgtccggtatttatagtgatggcagtggcacatactatgcagactccgtgaagggccgattcaccatctccagagacaacgccaagaacacggtgtatctgcaaatgaacagcctgaaacctgaggacacggcactgtattactgtgcaaaagggaggcatagtggtagttactaccactgggatgactactggggccaggggacccaggtcaccgtctcctca

SEQ ID NO: 1999 - DNA, 366 bp, synthetic construct
  source 1..366: mol_type = other DNA
gaggtgcagctggtggagtctgggggaggcttggcgcagcctggggggtctctgagactctcctgtgcagcctctggattcaccttcagtaactatgccatgagctgggcccgccaggctccaggaaaggggctcgagtgggtgtccggtatttatagtgatggtagtggcacatactatgcagactccgtgaagggccgattcaccatctccagagacaacgccaagaacacggtgtatctgcaaatgaacagcctgaaacctgaggacacggcactgtattactgtgcaaacgggaggcatagtggtagttactacccctgggatgactactggggccaggggacccaggtcaccgtctcctca

SEQ ID NO: 2000 - DNA, 366 bp, synthetic construct
  source 1..366: mol_type = other DNA
gaggtgcagctggtggagtctgggggaggcttggcgcagcctggggggtctctgagactctcctgtgcagcctctggattcaccttcagttactatgccatgagctgggtccgccaggctccaggaaaggggctcgagtgggtgtccggtatttatagtgatggcagtggcacatactatgcagactccgtgaagggccgattcaccatctccagagacaacgccaagaacacggtgtatctgcaaatgaacagcctgaaacctgaggacacggcactgtattactgtgcaaaagggaggcatagtggtagttacgacccctgggatgactactggggccaggggacccaggtcaccgtctcctca

SEQ ID NO: 2001 - DNA, 366 bp, synthetic construct
  source 1..366: mol_type = other DNA
gaggtgcagctggtggagtctgggggaggcttggcgcagcctggggggtctctgagactctcctgtgcagcctctggattcaccttcagttactatgccatgagctgggtccgccaggctccaggaaaggggctcgagtgggtgtccggtatttatagtgatggcagtggcacatactatgcagactccgtgaagggccgattcaccatctccagagacaacgccaagaacacggtgtatctgcaaatgaacagcctgaaacctgaggacacggcactgtattactgtgcaaaagggaggcatagtggtagtgactacccctgggatgactactggggccaggggacccaggtcaccgtctcctca

SEQ ID NO: 2002 - DNA, 366 bp, synthetic construct
  source 1..366: mol_type = other DNA
gaggtgcagctggtggagtctgggggaggcttggcgcagcctggggggtctctgagactctcctgtgcagcctctggattcaccttcagtaactatgccatgagctgggcccgccaggctccaggaaaggggctcgagtgggtgtccggtatttatagtgatggtagtggcacatactatgcagactccgtgaagggccgattcaccatctccagagacaacgccaagaatacggtgtatctgcaaatgaacagcctgaaacctgaggacacggcactgtattactgtgcaaaagggaggaataatggtagttactatccctgggatgactatcggggccaggggacccaggtcaccgtctcctca

SEQ ID NO: 2003 - DNA, 366 bp, synthetic construct
  source 1..366: mol_type = other DNA
gaggtgcagctggtggagtctgggggaggcttggcgcagcctggggggtctctgagactctcctgtgcagcctctggattcaccttcagtagctatgccatgagctgggtccgccagggtccaggaaaggggctcgagtgggtgtccggtatttatagtgatggtagtggtacatactatgcagattccgtgaagggccgattcaccatctccagagacaacgccaagaacacggtgtatctgcaaatgaacagcctgaagcctgaggacacggcactgtattactgtgcaaaagggaggcatagtggtagttactacccctgggaggagtactggggccgggggacccaggtcaccgtctcctca

SEQ ID NO: 2004 - DNA, 366 bp, synthetic construct
  source 1..366: mol_type = other DNA
gaggtgcagctggtggagtctgggggaggcttggtgcagcctggggggtctctgagactctcctgtgcagcctctggattcaccttcagtaactatgccatgagctgggcccgccaggctccaggaaaggggctcgagtgggtgtccggtatttatagtgatggtagtggcacatactatgcagactccgtgaagggccgattcaccatctccagagacaacgccaagaacacggtgtatctgcaaatgaacagcctgaaacctgaggacacggcactgtattactgtgcaaaagggaggggtagtggtagttactacccctgggatggctactggggccaggggacccaggtcaccgtctcctca

SEQ ID NO: 2005 - DNA, 366 bp, synthetic construct
  source 1..366: mol_type = other DNA
gaggtgcagctggtggagtctgggggaggcttggcgcagcctggggggtctctgagactctcctgtgcagcctctggattcaccttcagtagctatgccatgagctgggtccgccagggtccaggaaaggggctcgagtgggtgtccggtatttatagtgatggtagtggtacatactatgcagattccgtgaagggccgattcaccatctccagagacaacgccaagaacacggtgtatctgcaaatgaacagcctgaaacctgaggacacggcactgtattactgtgcaaaagggaggcatagtggtagttactaccccttggatgagtactggggccaggggacccaggtcaccgtctcctca

SEQ ID NO: 2006 - DNA, 366 bp, synthetic construct
  source 1..366: mol_type = other DNA
gaggtgcagctggtggagtctgggggaggcttggcgcagcctggggggtctctgagactctcctgtgcagcctctggattcaccttcagtaactatgccatgagctgggcccgccaggctccaggaaaggggctcgagtgggtgtccggtatttatagtgatggtagtggcacatactatgcagactccgtgaagggccgattcaccatctccagagacaacgccaagaacacggtgtatctgcaaatgaacagcctgaaacctgaggacacggcactgtattactgtgcaaaagggaggggtagtggtagttacttcccctgggatgactactggggccaggggacccaggtcaccgtctcctca

SEQ ID NO: 2007 - DNA, 366 bp, synthetic construct
  source 1..366: mol_type = other DNA
gaggtgcagctggtggagtctgggggaggcttggcgcagcctggggggtctctgagactctcctgtgcagcctctggattcaccttcagtagctatgccatgagctgggtccgccagggtccaggaaaggggctcgagtgggtgtccggtatttatagtgatggtagtggtacatactatgcagattccgtgaagggccgattcaccatctccagagacaacgccaagaacacggtgtatctgcaaatgaacagcctgaaacctgaggacacggcactgtattactgtgcaaaagggaggcatagtggtagttactaccactgggatgagtactggggccaggggacccaggtcaccgtctcctca

SEQ ID NO: 2008 - DNA, 366 bp, synthetic construct
  source 1..366: mol_type = other DNA
gaggtgcagctggtggagtctgggggaggcttggcgcagcctggggggtctctgagactctcctgtgcagcctctggattcaccttcagtagctatgccatgagctgggtccgccagggtccaggaaaggggctcgagtgggtgtccggtatttatagtgatggtagtggtacatactatgcagattccgtgaagggccgattcaccatctccagagacaacgccaagaacacggtgtatctgcaaatgaacagcctgaaacctgaggacacggcactgtattactgtgcaaaagggcggcatagtggtagttactacccctgggatgagtcctggggccaggggacccaggtcaccgtctcctca

SEQ ID NO: 2009 - DNA, 366 bp, synthetic construct
  source 1..366: mol_type = other DNA
gaggtgcagctggtggagtctgggggaggcttggcgcagcctggggggtctctgagactctcctgtgcagcctctggattcacttttagtaactatgccatgagctgggtccgccaggctccaggaaaggggctcgagtgggtgtccggtatttatagtgatggtagtggtacatactatgcagactccgtgaagggccgattcaccatctccagagacaacgccaagaacacggtgtatctgcaaatgaacagcctgaaacctgaggacacggcactgtattactgtgcaaaagggaggcatagtggtagttactaccactgggatgagtactggggccaggggacccaggtcaccgtctcctca

SEQ ID NO: 2010 - DNA, 366 bp, synthetic construct
  source 1..366: mol_type = other DNA
gaggtgcagctggtggagtctgggggaggcttggcgcagcctggggggtctctgagactctcctgtgcagcctctggattcaccttcagtagctatgccatgagctgggtccgccagggtccaggaaaggggctcgagtgggtgtccggtatttatagtgatggtagtggtacatactatgcagattccgtgaagggccgattcaccatctccagagacaacgccaagaacacggtgtatctgcaaatgaacagcctgaaacctgaggacacggcactgtattactgtgcaaaagggatgcatagtggtagttactacccctgggatgagtactggggccaggggacccaggtcaccgtctcctca

SEQ ID NO: 2011 - DNA, 366 bp, synthetic construct
  source 1..366: mol_type = other DNA
gaggtgcagctggtggagtctgggggaggcttggcgcagcctggggggtctctgagactctcctgtgcagcctctggattcacctttagtaactatgccatgagctgggtccgccaggctccaggaaaggggctcgagtgggtgtccggtatttatagtgatggtagtggtacatactatgcagactccgtgaagggccgattcaccatctccagagacaacgccaagaacacggtgtatctgcagatgaacagcctgaaacctgaggacacggcactgtattactgtgcaaaagggaggcataggggtagttactacccctgggatgagtactggggccaggggacccaggtcaccgtctcctca

SEQ ID NO: 2012 - DNA, 366 bp, synthetic construct
  source 1..366: mol_type = other DNA
gaggtgcagctggtggagtctgggggaggcttggcgcagcctggggggtctctgagactctcctgtgcagcctctggattcaccttcagtaactatgccatgagctgggcccgccaggctccaggaaaggggctcgagtgggtgtccggtatttatagtgatggtagtggcacatactatgcagactccgtgaagggccgattcaccatctccagagacaacgccaagaatacggtgtatctgcaaatgaacagcctgaaacctgaggacacggcactgtattactgtgcaaaagggaggaatattggtagttactatccctgggatgactattggggccaggggacccaggtcaccgtctcctca

SEQ ID NO: 2013 - DNA, 366 bp, synthetic construct
  source 1..366: mol_type = other DNA
gaggtgcagctggtggagtctgggggaggcttggcgcagcctggggggtctctgagactctcctgtgcagcctctggattcaccttcagtaactatgccatgagctgggtccgccaggctccaggaaaggggctcgagtgggtgtccggtatttatagtgatggtagtggcacatactatgcagactccgtgaagggccgattcaccatctccagagacaacgccaagaatacggtgtatctgcaaatgaacagcctgaaacctgaggacacggcactgtattactgtgcaaaagggaggaatagtgttagttactatccctgggatgactactggggccaggggacccaggtcaccgtctcctca

SEQ ID NO: 2014 - DNA, 366 bp, synthetic construct
  source 1..366: mol_type = other DNA
gaggtgcagctggtggagtctgggggaggcttggcgcagcctggggggtctctgagactctcctgtgcagcctctggattcacctttagtaactatgccatgagctgggtccgccaggctccaggaaaggggctcgagtgggtgtccggtatttatagtgatggtagtggtacatactatgcagactccgtgaagggccgattcaccatctccagagacaacgccaagaacacggtgtatctgcaaatgaacagcctaaaacctgaggacacggcactgtattactgtgcaaagtggaggcatagtggtagttactacccctgggatgagtactggggccaggggacccaggtcaccgtctcctca

SEQ ID NO: 2015 - DNA, 366 bp, synthetic construct
  source 1..366: mol_type = other DNA
gaggtgcagctggtggagtctgggggaggcttggcgcagcctggggggtctctgagactctcctgtgcagcctctggattcacctttagtaactatgccatgagctgggtccgccaggctccaggaaaggggctcgagtgggtgtccggtatttatagtgatggtagtggtacatactatgcagactccgtgaagggccgattcaccatctccagagacaacgccaagaacacggtgtatctgcaaatgaacagcctgaaacctgaggacacggcactgtattactgtgcaaaagggaggcatagtggtagttactacccctgggatgagtcctggggccaggggacccaggtcaccgtctcctca

SEQ ID NO: 2016 - DNA, 366 bp, synthetic construct
  source 1..366: mol_type = other DNA
gaggtgcagctggtggagtctgggggaggcttggcgcagcctggggggtctctgagactctcctgtgcagcctctggattcacctttagtaactatgccatgagctgggtccgccaggctccaggaaaggggctcgagtgggtgtccggtatttatagtgatggtagtggtacatactatgcagactccgtgaagggccgattcaccatctccagagacaacgccaagaacacggtgtatctgcaaatgaacagcctgaaacctgaggacacggcactgtattactgtgcaaaagggaggcatagtggtagatactacccctgggatgagtactggggccaggggacccaggtcaccgtctcctca

SEQ ID NO: 2017 - DNA, 366 bp, synthetic construct
  source 1..366: mol_type = other DNA
gaggtgcagctggtggagtctgggggaggcttggcgcagcctggggggtctctgagactctcctgtgcagcctctggattcaccttcagtagctatgccatgagctgggtccgccagggtccaggaaaggggctcgagtgggtgtccggtatttatagtgatggtagtggtacatactatgcagattccgtgaagggccgattcaccatctccagagacaacgccaagaacacggtgtatctgcaaatgaacagcctgaaacctgaggacacggcactgtattactgcgcaaaagggaggcatagtggtagttactaccccggggatgagtactggggccaggggacccaggtcaccgtctcctca

SEQ ID NO: 2018 - DNA, 366 bp, synthetic construct
  source 1..366: mol_type = other DNA
gaggtgcagctggtggagtctgggggaggcttggcgcagcctggggggtctctgagactctcctgtgcagcctctggattcacctttagtaactatgccatgagctgggtccgccaggctccaggaaaggggctcgagtgggtgtccggtatttatagtgatggtagtggtacatactatgcagactccgtgaagggccgattcaccatctccagggacaacgccaagaacacggtgtatctgcaaatgaacagcctgaaacctgaggacacggcactgtattactgtgcaaaagggaggcatagtggtagttcctacccctgggatgagtactggggccaggggacccaggtcaccgtctcctca

SEQ ID NO: 2019 - DNA, 366 bp, synthetic construct
  source 1..366: mol_type = other DNA
gaggtgcagctggtggagtctgggggaggcttggcgcagcctggggggtctctgagactctcctgtgcagcctctggattcaccttcagtagctatgccatgagctgggtccgccagggtccaggaaaggggctcgagtgggtgtccggtatttatagtgatggtagtggtacatactatgcagattccgtgaagggccgattcaccatctccagagacaacgccaagaacacggtgtatctgcaaatgaacagcctgaaacctgaggacacggcactgtattactgtgcaaaatggaggcatagtggtagttactacccctgggatgagtactggggccaggggacccaggtcaccgtctcctca

SEQ ID NO: 2020 - DNA, 366 bp, synthetic construct
  source 1..366: mol_type = other DNA
gaggtgcagctggtggagtctgggggaggcttggcgcagcctggggggtctctgagactctcctgtgcagcctctggattcaccttcagtaactatgccatgagctgggcccgccaggctccaggaaaggggctcgagtgggtgtccggtatttatagtgatggtagtggcacatactatgcagactccgtgaagggccgattcaccatctccagagacaacgccaagaatacggtgtatctgcaaatgaacagcctgaaacctgaggacacggcactgtattactgtgcaaaagggaggaatagtggtagttcctatccctgggatgactattggggccaggggacccaggtcaccgtctcctca

SEQ ID NO: 2021 - DNA, 366 bp, synthetic construct
  source 1..366: mol_type = other DNA
gaggtgcagctggtggagtctgggggaggcttggcgcagcctggggggtctctgagactctcctgtgcagcctctggattcaccttcagtagctatgccatgagctgggtccgccagggtccaggaaaggggctcgagtgggtgtccggtatttatagtgatggtagtggtacatactatgcagattccgtgaagggccgattcaccatctccagagacaacgccaagaacacggtgtatctgcaaatgaacagcctgaaacctgaggacacggcactgtattactgtgcaaaagggaggcatagtggtagttcctacccctgggatgagtactggggccaggggacccaggtcaccgtctcctca

SEQ ID NO: 2022 - DNA, 366 bp, synthetic construct
  source 1..366: mol_type = other DNA
gaggtgcagctggtggagtctgggggaggcttggcgcagcctggggggtctctgagactctcctgtgcagcctctggattcaccttcagtaactatgccatgagctgggtccgccaggctccaggaaaggggctcgagtgggtgtccggtatttatagtgatggtagtggcacatactatgcagactccgtgaagggccgattcaccatctccagagacaacgccaagaatacggtgtatctgcaaatgaacagcctgaaacctgaggacacggcactgtattactgtgcaaaagggaggaataggggtagttactatccctgggatgactactggggccaggggacccaggtcaccgtctcctca

SEQ ID NO: 2023 - DNA, 366 bp, synthetic construct
  source 1..366: mol_type = other DNA
gaggtgcagctggtggagtctgggggaggcttggcgcagcctggggggtctctgagactctcctgtgcagcctctggattcacctttagtaactatgccatgagctgggtccgccaggctccaggaaaggggctcgagtgggtgtccggcatttatagtgatggtagtggtacatactatgcagactccgtgaagggccgattcaccatctccagagacaacgccaagaacacggtgtatctgcaaatgaacagcctgaaacctgaggacacggcactgtattactgtgcaaaagggaggcatagtggtggttactacccctgggatgagtactggggccaggggacccaggtcaccgtctcctca

SEQ ID NO: 2024 - DNA, 366 bp, synthetic construct
  source 1..366: mol_type = other DNA
gaggtgcagctggtggagtctgggggaggcttggcgcagcctggggggtctctgagactctcctgtgcagcctctggattcaccttcagtaactatgccatgagctgggcccgccaggctccaggaaaggggctcgagtgggtgtccggtatttatagtgatggtagtggcacatactatgcagactccgtgaagggccgattcaccatctccagagacaacgccaagaacacggtgtatctgcaaatgaacagcctgaaacctgaggacacggcactgtattactgtgcaaaagggaggggtagtggtagttactacccctggggtgactactggggccaggggacccaggtcaccgtctcctca

SEQ ID NO: 2025 - DNA, 369 bp, synthetic construct
  source 1..369: mol_type = other DNA
gaggtgcagctggtggagtctgggggaggattggtgcaggctgggggctcgctgagactctcctgtgcagcctctggacgcaccttcagtagctatggcatgggctggttccgccaggctccaggagaggagcgtgagtttgtagcagctattagtcagagtggtgggcgtacaaggtactcagactccgtgaagggccgattcaccatctccagagacaacgccaagaacatggtgtatctgcaaatgaacagcctgaaacctgaggacacggccgtttattactgtgcagccacaaatttcctgatagcgactactatatctgcatatgactactggggccaggggacccaggtcaccgtctcctca

SEQ ID NO: 2026 - DNA, 369 bp, synthetic construct; identical to SEQ ID NO: 25
  source 1..369: mol_type = other DNA

SEQ ID NO: 2027 - DNA, 369 bp, synthetic construct
  source 1..369: mol_type = other DNA
gaggtgcagctggtggagtctgggggaggattggtgcaggctgggggctcgctgagcgtctcctgtgcagcctctggacgcaccttcagttggtatggcatgggctggttccgccaggctccaggagaggagcgtgagtttgtagcagctattagtcagagtggtgggcgtacaaggtactcagactccgtgaagggccgattcaccatctccagagacaacgccaagaacatggtgtatctgcaaatgaacagcctgaaacctgaggacacggccgtttattactgtgcagcctcaaatttcctgatagcgactactatatctgcatatgactactggggccaggggacccaggtcaccgtctcctca

SEQ ID NO: 2028 - DNA, 369 bp, synthetic construct
  source 1..369: mol_type = other DNA
gaggtgcagctggtggagtctgggggaggattggtgcaggctgggggctcgctgagcgtctcctgtgcagcctctggacgcactctcagtgggtatggcatgggctggttccgccaggctccaggggaggagcgtgagtttgtagcagctattagccagagtggtgggcgtacaaggtactcagactccgtgaagggccgattcaccatctccagagacaacgccaagaacatggtgtatctgcaaatgaacagcctgaaacctgaggacacggccatttattactgtgcagcctcaaatttcctgttagcgactactaactctgcatatgactactggggtcaggggacccaggtcaccgtctcctca

SEQ ID NO: 2029 - DNA, 369 bp, synthetic construct
  source 1..369: mol_type = other DNA
gaggtgcagctggtggagtctgggggaggcttggtgcaggctgggggctctctgagactctcctgtgcagcctctggacgcaccttcgctagctttggcatgggctggttccgccaggctatagggaaggagcgtgaatttgtagcagctattagtcggggcggtggacgtacaaggtattcagactccgtgaagggccgattcaccatctccagagacgacgccaagaacatggtgtatctgcaaatgaacagcctgaaacctgaggacacggccgtttattactgtgcagcctcatatttcctactagcgactactatatctggatatgactactggggccaggggacccaggtcaccgtctcctca

SEQ ID NO: 2030 - DNA, 369 bp, synthetic construct
  source 1..369: mol_type = other DNA
gaggtgcagctggtggagtctgggggaggattggtgcaggctgggggctctctgagactctcctgtgcagcctctggacgcaccttcgctagctttggcatgggctggttccgccaggctatagggaaggagcgtgaatttgtagcagctattagtcggagtggtggacgtacaaggtattcagactccgtgaagggccgattcaccatctccagagacgacgccaagaacagggtgtatctgcaaatgaacagcctgaaacctgaggacacggccgtttattactgtgcagcctcatatttcctactagcgactactatatctggatatgacttctggggccaggggacccaggtcaccgtctcctca

SEQ ID NO: 2031 - DNA, 369 bp, synthetic construct
  source 1..369: mol_type = other DNA
gaggtgcagctggtggagtctgggggaggattggtgcaggctgggggctctctgagactctcctgtgcagcctctggacgcaccttcagtagctatggcatgggctggttccgccaggctccagggaaggagcgtgagtttgtagtagctattagtgggagtggtgggcgtacacgcttttcagactccgtgaagggccgattcaccatctccagagacaacgccaagaacatggtgtatctgcaaatgaacagcctgaaacctgaggacacggccgtttattactgtgcagcctcggatttcttgatagcgactagtatatccgcatatgactactggggccaggggacccaggtcaccgtctcctca

SEQ ID NO: 2032 - DNA, 369 bp, synthetic construct
  source 1..369: mol_type = other DNA
gaggtgcagctggtggagtctgggggaggattggtgcaggctgggggctctctgagactctcctgtgcagcctctggacgcaccttcgctagctttggcatgggctggttccgccagccgataggcgaggagcgtgaatttgttgcagctattagtcagggtggtgggcgtacaaggtattcagactccgtgaagggccgattcaccatctccagagacgacgccaacaacatggtgtatctgcaaatgaacagcctgaaacctgaggacacggccgtttattactgtgcagcctcatatttcctgttagcgactactatatctggatatgactactggggccaggggacccaggtcaccgtctcctca

SEQ ID NO: 2033 - DNA, 369 bp, synthetic construct
  source 1..369: mol_type = other DNA
gaggtgcagctggtggagtctgggggaggattggtgcaggctgggggctctctgagactctcctgtgcagcctctggacgcaccttcagtagctatggcatgggctggttccgccaggctccagggaaggagcgtgagtttgtagtggctgttagtgggggtggtgggcgtacacgcttttcagactccgtgaagggccgattcaccatctccagagacaacgccaagaacatggtgtatctgcaaatgaacagcctgaaacctgaggacacggccgtttattactgtgcagcctctgatttcttgatagcgactagtatatccgcatatgactactggggccaggggacccaggtcaccgtctcctca

SEQ ID NO: 2034 - DNA, 369 bp, synthetic construct
  source 1..369: mol_type = other DNA
gaggtgcagctggtggagtctgggggaggattggtgcaggctgggggctcgctgagcgtctcctgtgcagcctctggacgcaccttcagttggtatggcatgggctggttccgccaggctccaggagaggagcgcgagtttgtagcagctattagtcggagtggtgggcgtacaaggtactcagactccgtgaagggccgattcaccatctccagagacaacgccaagaacatggtgtatctgcaaatgaacagcctgaaacctgaggacacggccgtttattactgtgcagcctcaaatttcctgatagcgactactatatctgcatatgactactggggccaggggacccaggtcaccgtctcctca

SEQ ID NO: 2035 - DNA, 369 bp, synthetic construct
  source 1..369: mol_type = other DNA
gaggtgcagctggtggagtctgggggaggattggtgcaggctgggggctcgctgagcgtctcctgtgcagcctctggacgcaccttcagttggtatggcatgggctggttccgccaggctccaggagaggagcgtgtgtttgtagcagctattagtcacagtggtgggcgtacaaggtactcagactccgtgaagggccgattcaccatctccagagacaacgccaagaacatggtgtatctgcaaatgaacagcctgaaacctgaggacacggccgtttattactgtgcagcctcaaatttcctgatagcgactactatatctgcatatgactactggggccaggggacccaggtcaccgtctcctca

SEQ ID NO: 2036 - DNA, 369 bp, synthetic construct
  source 1..369: mol_type = other DNA
gaggtgcagctggtggagtctgggggaggattggtgcaggctgggggctcgctgagactctcctgtgcagcctctggacgcaccttcagtagctatggcatgggctggttccgccaggctccaggagaggagcgtgagtttgtagcagctattagtcagagtggtgggcgtacaaggtactcagactccgtgaagggccgattcaccatctccagagacaacgccaagaacatggtgtatctgcaaatgaacagcctgaaacctgaggacacggccgtttattactgtgcagccacaaatttcctgagagcgactactatatctgcatatgactactggggccaggggacccaggtcaccgtctcctca

SEQ ID NO: 2037 - DNA, 369 bp, synthetic construct
  source 1..369: mol_type = other DNA
gaggtgcagctggtggagtctgggggaggattggtgcaggctgggggctcgctgagactctcctgtgcagcctctggacgcaccttcagtagctatggcatgggctggttccgccaggctccaggagaggagcgtgagtttgtagcagctattagtcagagtggtgggcgtacaaggtactcagactccgtgaagggccgattcaccatctccagagacaacgccaagaacatggtgtatctgcaaatgaacagcctgaaacctgaggacacggccgtttattactgtgcagccacaaatttcctgatggcgactactatatctgcatatgactactggggccaggggacccaggtcaccgtctcctca

SEQ ID NO: 2038 - DNA, 369 bp, synthetic construct
  source 1..369: mol_type = other DNA
gaggtgcagctggtggagtctgggggaggattggtgcaggctgggggctctctgagactctcctgtgcagcctctggacgcaccttcgctgactttggcatgggctggttccgccaggctatagggaaggagcgtgaatttgtagcagctattagtcggagtggtggacgtacaaggtattcagactccgtgaagggccgattcaccatctccagagacgacgccaagaacatggtgtatctgcaaatgaacagcctgaaacctgaggacacggccgtttattactgtgcagcctcatatttcctactagcgattactatatctggatatgactactggggccaggggacccaggtcaccgtctcctca

SEQ ID NO: 2039 - DNA, 369 bp, synthetic construct
  source 1..369: mol_type = other DNA
gaggtgcagctggtggagtctgggggaggattggtgcaggctgggggctcgctgagcgtctcctgtgcagcctctggacgcaccttcagttggaatggtatgggctggttccgccaggctccaggagaggagcgtgagtttgtagcagctattagtcaaagtggtgggcgtccaaggtactcagactccgtgaagggccgattcaccatctccagagataacgccaagaatatggtgtatctgcaaatgaacagcctgaaacctgaggacacggccgtttattactgtgcagcctcagatttcctgttagcgactactatatctgcatatgactactggggccaggggacccaggtcaccgtctcctca

SEQ ID NO: 2040 - DNA, 369 bp, synthetic construct
  source 1..369: mol_type = other DNA
gaggtgcagctggtggagtctgggggaggattggtgcaggctgggggctcgctgagactctcctgtgcagcctctggacgcaccttcagtagctatggcatgggctggttccgccaggctccaggagaggagcgtgagtttgtagcagctattagtcagagtggtgggcgtacaaggtactcagactccgtgaagggccgattcaccatctccagagacaacgccaagaacatggtgtatctgcaaatgaacagcctgaaacctgaggacacggccgtttattactgtgcagccacaaatttcctgatagcgactactatatctgcatatgaccactggggccaggggacccaggtcaccgtctcctca

SEQ ID NO: 2041 - DNA, 369 bp, synthetic construct
  source 1..369: mol_type = other DNA
gaggtgcagctggtggagtctgggggaggattggtgcaggctgggggctctctgagactctcctgtgcagcctctggacgcaccttcgctagctttggcatgggctggttccgccaggctatagggaaggagcgtgaatttgtagcaggtattagtcagagtggtggacgtacaaggtattcagactccgtgaagggccgattcaccatctccagagacgacgccaagaacatggtgtatctgcaaatgaacagcctgaaacctgaggacacggccgtttattactgtgcagcctcatatttcctgatagcgaatactatatctggatatgactactggggccaggggacccaggtcaccgtctcctca

SEQ ID NO: 2042 - DNA, 369 bp, synthetic construct
  source 1..369: mol_type = other DNA
gaggtgcagctggtggagtctgggggaggattggtgcaggctgggggctcgctgagactctcctgtgcagcctctggacgcaccttcagtagctatggcatgggctggttccgccaggctccaggagaggagcgtgagtttgtagcagctattagtcagagtggtgggcgtacaaggtactcagactccgtgaagggccgattcaccatctccagagacaacgccaagaacatggtgtatctgcaaatgaacagcctgaaacctgaggacacggccgtttattactgtgcagccacaaatttcctgatagcggctactatatctgcatatgactactggggccaggggacccaggtcaccgtctcctca

SEQ ID NO: 2043 - DNA, 369 bp, synthetic construct
  source 1..369: mol_type = other DNA
gaggtgcagctggtggagtctgggggaggattggcgcaggctgggggctcgctgagactctcctgtgcagcctctggacgcaccttcagtagctatggcatgggctggttccgccaggctccaggagaggagcgcgagtttgtagcagctattagtcagagtggtgggcgtacaaggtactcagactccgtgaagggccgattcaccatctccagagacaacgccaagaacatggtgtatctgcaaatgaacagcctgaaacctgaggacacggccgtttattactgtgcagccacaaatttcctgatagcgactactatatctgcatatggctactggggccaggggacccaggtcaccgtctcctca

SEQ ID NO: 2044 - DNA, 369 bp, synthetic construct
  source 1..369: mol_type = other DNA
gaggtgcagctggtggagtctgggggaggattggtgcaggctgggggctcgctgagactctcctgtgcagcctctggacgcaccttcagtagctatggcatgggctggttccgccaggctccaggagaggagcgtgagtttgtagcagctattagtcagagtggtgggcgtacaaggtactcagactccgtgaagggccgattcaccatctccagagacaacgccaagaacatggtgtatctgcaaatgaacagcctgaaacctgaggacacggccgtttattactgtgcagccacaaatttcctgatagcgactactatgtctgcatatgactactggggccaggggacccaggtcaccgtctcctca

SEQ ID NO: 2045 - DNA, 369 bp, synthetic construct
  source 1..369: mol_type = other DNA
gaggtgcagctggtggagtccgggggaggattggtgcaggctgggggctcgctgagactctcctgtgcagcctctggacgcaccttcagtagctatggcgtgggctggttccgccaggctccaggagaggagcgtgagtttgtagcagctattagtcagagtggtgggcgtacaaggtactcagactccgtgaagggccgattcaccatctccagagacaacgccaagaacatggtgtatctgcaaatgaacagcctgaaacctgaggacacggccgtttattactgtgcagccacaaatttcctgatagcggctactatatctgcatatgactactggggccaggggacccaggtcaccgtctcctca

SEQ ID NO: 2046 - DNA, 369 bp, synthetic construct
  source 1..369: mol_type = other DNA
gaggtgcagctggtggagtctgggggaggattggtgcaggctgggggctcgctgagactctcctgtgcagcctctggacgcaccttcagtagctatggcatgggctggttccgccaggctccaggagaggagcgtgagtttgtagcagctattagtcagagtggtgggcgtacaaggtactcagactccgtgaagggccgattcaccatctccagagacaacgccaagaacatggtgtatctgcaaatgaacagcctgaaacctgaggacacggccgtttattactgtgcagccacaaatctcctgatagcgactactatatctgcatatgactactggggccaggggacccaggtcaccgtctcctca

SEQ ID NO: 2047 - DNA, 369 bp, synthetic construct
  source 1..369: mol_type = other DNA
gaggtgcagctggtggagtctgggggaggattggtgcaggctgggggctcgctgagactctcctgtgcagcctctggacgcaccttcagtagctatggcatgggctggttccgccaggctccaggagaggagcgtgagtttgtagcagctattagtcagagtggtgggcgtacaaggtactcagactccgtgaagggccgattcaccatctccagagacaacgccaagaacatggtgtatctgcaaatgaacagcctgaaacctgaggacacggccgtttattactgtgcagacacaaatttcctgatcgcgactactatatctgcatatgactactggggccaggggacccaggtcaccgtctcctca

SEQ ID NO: 2048 - DNA, 369 bp, synthetic construct
  source 1..369: mol_type = other DNA
gaggtgcagctggtggagtctgggggaggattggtgcaggctgggggctcgctgagactctcctgtgcagcctctggacgcaccttcagtagctatggcatgggctggttccgccaggctccaggagaggagcgtgagtttgtagcagctattagtcagagtggtgggcgtacaaggtactcagactccgtgaagggccgattcaccatctccagagacaacgccaagaacatggtgtatctgcaaatgaacagcctgaaacctgaggacacggccgtttattactgtgcagccacaaattccctgatagcgactactatatctgcatatgactactggggccaggggacccaggtcaccgtctcctca

SEQ ID NO: 2049 - DNA, 369 bp, synthetic construct
  source 1..369: mol_type = other DNA
gaggtgcagctggtggagtctgggggaggattggtgcaggctgggggctcgctgagcgtctcctgtgcagcctctggacgcactctcagtgggtatggcatgggctggttccgccaggctccaggggaggagcgtgagtttgtagcagctattagccagagtggtgggcgtacaaggtactcagactccgtgaagggccgattcaccatctccagagacaacgccaagaacatggtgtatctgcaaatgaacagcctgaaacctgaggacacggccatttattactgtgcagcctcaattttcctgttagcgactactaactctgcatatgactactggggtcaggggacccaggtcaccgtctcctca

SEQ ID NO: 2050 - DNA, 369 bp, synthetic construct
  source 1..369: mol_type = other DNA
gaggtgcagctggtggagtctgggggaggattggtgcaggctgggggctcgctgagactctcctgtgcagcctctggacgcaccttcagtagctatggcatgggctggttccgccaggctccaggagaggagcgagagtttgtagcagctattagtcagagtggtggccgtacaaggtactcagactccgtgaagggccgattcaccatctccagagacaacgccaagaacatggtgtatctgcaaatgaacagcctgaaacctgaggacacggccgtttattactgtgcagccacaaatttcctgatagcgactactatatctgcatatgactcctggggccaggggacccaggtcaccgtctcctca

SEQ ID NO: 2051 - DNA, 369 bp, synthetic construct
  source 1..369: mol_type = other DNA
gaggtgcagctggtggagtctgggggagggttggtgcaggctgggggctcgctgagactctcctgtgcagcctctggacgcaccttcagtagctatggcatgggctggttccgccaggctccaggagaggagcgtgagtttgtagcagctattagtcagagtggtgggcgtacaaggtactcagactccgtgaagggccgattcaccatctccagagacaacgccaagaacatggtgtatctgcaaatgaacagcctgaagcctgaggacacggccgtttattactgtgcagccacaaatttcctgatagcgattactatatctgcatatgactactggggccaggggacccaggtcaccgtctcctca

SEQ ID NO: 2052 - DNA, 369 bp, synthetic construct
  source 1..369: mol_type = other DNA
gaggtgcagctggtggagtctgggggaggattggtgcaggctgggggctcgctgagactctcctgcgcagcctctggacgcaccttcagtagctatggcatgggctggttccgccaggctccaggagaggagcgtgagtttgtagcagctattagtcagagtggtgggcgtacaaggtactcagactccgtgaagggccgattcaccatctccagagacaacgccaagaacatggtgtatctgcaaatgaacagcctgaaacctgaggacacggccgtttattactgtgcagccacaaagttcctgatagcgactactatatctgcatatgactactggggccaggggacccaggtcaccgtctcctca

SEQ ID NO: 2053 - DNA, 369 bp, synthetic construct
  source 1..369: mol_type = other DNA
gaggtgcagctggtggagtctgggggaggattggtgcaggctgggggctcgctgagactctcctgtgcagcctctggacgcaccttcagtagctatggcatgggctggttccgccaggctccaggagaggagcgtgagtttgtagcagctattagtcagagtggtgggcgtacaaggtactcagactccgtgaagggccgattcaccatctccagagacaacgccaagaacatggtgtatctgcaaatgaacagcctgaaacctgaggacacggccgtttattactgtacagccacaaatttcctgatagcgactactatatctgcatatgactactggggccaggggacccaggtcaccgtctcctca

SEQ ID NO: 2054 - DNA, 369 bp, synthetic construct
  source 1..369: mol_type = other DNA
gaggtgcagctggtggagtctgggggaggattggtgcaggctgggggctcgctgagactctcctgtgcagcctctggacgcaccttcagtagctatggcatgggctggttccgccaggctccaggagaggagcgtgagtttgtagcagctattagtcagagtggtgggcgtacaaggtactcagactccgtgaagggccgattcaccatctccagagacaacgtcaagaacatggtgtatctgcaaatgaacagcctgaaacctgaggacacggccgtttattactgtgcagccacaaatttcctgatagcgactactatatctgcacatgactactggggccaggggacccaggtcaccgtctcctca

SEQ ID NO: 2055 - DNA, 369 bp, synthetic construct
  source 1..369: mol_type = other DNA
gaggtgcagctggtggagtctggggggggattggtgcaggctgggggctcgctgagactctcctgtgcagcctctggacgcaccttcagtagctatggcatgggctggttccgccaggctccaggagaggagcgtgagtttgtagcagctattagtcagagtggtgggcgtacaaggtactcagactccgtgaagggccgattcaccatctccagagacaacgccaagaacatggtgtatctgcaaatgaacagcctgaaacctgaggacacggccgtttattactgtgcagccacaaatgtcctgatagcgactactatatctgcatatgactactggggccaggggacccaggtcaccgtctcctca

SEQ ID NO: 2056 - DNA, 369 bp, synthetic construct
  source 1..369: mol_type = other DNA
gaggtgcagctggtggagtctgggggaggattggtgcaggctgggggctctctgagactctcctgtgcggcctctggacgcaccttcgctagctttggcatgggctggttccgccaggctatagggaaggagcgtgaatttgtagcaggtattagtcagagtggtggacgtacaaggtattcagactccgtgaagggccgattcaccatctccagagacgacgccaagaacatagtgtatctgcaaatgaacagcctgaaacctgaggacacggccgtttattactgtgcagcctcatatttcctgatagcgaatactatatctggatatgactactggggccaggggacccaggtcaccgtctcctca

SEQ ID NO: 2057 - DNA, 369 bp, synthetic construct
  source 1..369: mol_type = other DNA
gaggtgcagctggtggagtctgggggaggattggtgcaggctgggggctcgctgagactctcctgtgcagcctctggacgcaccttcagtagctatggcatgggctggttccgccaggctccaggagaggagcgtgagtttgtagcagctattagtcagagtggtgggcgtacaaggtactcagactccgtgaagggccgattcaccatctccagagacaacgccaagaacatggtgtatctgcaaatgaacagcctgaaacctgaggacacggccgtttatcactgtgcagccacaaatttcccgatagcgactactatatctgcatatgactactggggccaggggacccaggtcaccgtctcctca

SEQ ID NO: 2058 - DNA, 369 bp, synthetic construct
  source 1..369: mol_type = other DNA
gaggtgcagctggtggagtctgggggaggattggtgcaggctgggggctcgctgagactctcctgtgcagcctctggacgcaccttcagtagctatggcatgggctggttccgccaggctccaggagaggagcgtgagtttgtagcagctattagtcagagtggtgggcgtacaaggtactcagactccgtgaagggccgattcaccatctccagagacaacgccaagaacatggtgtatctgcaaatgaacagcctgaaacctgaggacacggccgtttattactgtgcagccacaaatttcctgatagcgactgctatatctgcatatgactactggggccaggggacccaggtcaccgtctcctca

SEQ ID NO: 2059 - DNA, 369 bp, synthetic construct
  source 1..369: mol_type = other DNA
gaggtgcagctggtggagtctgggggaggattggtgcaggctgggggctcgctgagcgtctcctgtgcagcctctggacgcaccttcagttggaatggtatgggctggttccgccaggctccaggagaggagcgtgagtttgtagcagctattagtcaaggtggtgggcgtacaaggtactcagactccgtgaagggccgattcaccatctccagagacaacgccaagaatatggtgtatctgcaaatgaacagcctgaaacctgaggacacggccgtttattactgtgcagcctcagatttcctgttagcgactactatatctgcatatgactactggggccaggggacccaggtcaccgtctcctca

SEQ ID NO: 2060 - DNA, 369 bp, synthetic construct
  source 1..369: mol_type = other DNA
gaggtgcagctggtggagtctgggggaggattggtgcaggctgggggctctctgagactctcctgtgcagcctctggacgcaccttcagtagctatggcatgggctggttccgccaggctccagggaaggagcgtgaatttgtagtagccattagtgggggtggtgggcgtacacgcttttcagactccgtgaagggccgattcaccatctccagagacaacgccaagaacatggtgtatctgcaaatgaacagcctgaaacctgaggacacggccgtttattactgtgcagcctccgatttcttgatagcgactactatatccgcatatgactactggggccaggggacccaggtcaccgtctcctca

SEQ ID NO: 2061 - DNA, 369 bp, synthetic construct
  source 1..369: mol_type = other DNA
gaggtgcagctggtggagtctgggggaggactggtgcaggctgggggctcgctgagactctcctgtgcagcctctggacgcaccttcagtagctatggcatgggctggttccgccaggctccaggagaggagcgtgagtttgtagcagctattagtcagagtggtgggcgtacaaggtactcagactccgtgaagggccgattcaccatctccagagacaacgccaagaacatggtgtatctgcaaatgaacagcctgaaacctgaggacacggccgtttattactgtgcagccacaaatttcctgatagcgactactatatctgcatatgacgactggggccaggggacccaggtcaccgtctcctca

SEQ ID NO: 2062 - DNA, 369 bp, synthetic construct
  source 1..369: mol_type = other DNA
gaggtgcagctggtggagtctgggggaggattggtgcaggctgggggctcgctgagactctcctgtgcagcctctggacgcaccttcagtagctatggcatgggctggttccgccaggctccaggagaggagcgtgagtttgtagcagctattagtcagagtggtgggcgtacaaggtactcagactccgtgaagggccgattcaccatctccagagacaacgccaagaacatggtgtatctgcaaatgaacagcctgaaacctgaggacacggccgtttattactgtgcagccacaaatttcctgttagcgactactatatctgcatatgactactggggccaggggacccaggtcaccgtctcctca

SEQ ID NO: 2063 - DNA, 369 bp, synthetic construct
  source 1..369: mol_type = other DNA
gaggtgcagctggtggagtctgggggaggattggtgcaggctgggggctcgctgagactctcctgtgcagcctctggacgcaccttcagtagctatggcatgggctggttccgccaggctccaggagaggagcgtgagtttgtagcagctattagtcagagtggtgggcgtacaaggtactcagaccccgtgaagggccgattcaccatctccagagacaacgccaagaacatggtgtatctgcaaatgaacagcctgaaacctgaggacacggccgtttattactgtgcagccacaaatttcctgatagcgactactatgtctgcatatgactactggggccaggggacccaggtcaccgtctcctca

SEQ ID NO: 2064 - DNA, 369 bp, synthetic construct
  source 1..369: mol_type = other DNA
gaggtgcagctggtggagtctgggggaggattggtgcaggctgggggctctctgagactctcctgtgcagcctctggacgcaccttcagtagctatggcatgggctggttccgccaggctccagggaaggagcgtgagtttgtagtagctattagtgggggtggtgggcgtacacgcttttcagactccgtgaagggccgattcaccatctccagagacaacgccaagagcatggtgtatctgcaaatgaacagcctgaaacctgaggacacggccgtttattactgtgcagcctcagatttcttgatagcgactactttatccgcatatgactactggggccaggggacccaggtcaccgtctcctca

SEQ ID NO: 2065 - DNA, 369 bp, synthetic construct
  source 1..369: mol_type = other DNA
gaggtgcagctggtggagtctgggggaggattggtgcaggctgggggctcgctgagactctcctgtgcagcctctggacgcaccttcagtagctatggcatgggctggttccgccaggctccaggagaggagcgtgagtttgtagcagctattagtcagagtggtgggcgtacaaggtactcagactccgtgaagggccgattcaccatctccagagacaacgccaagaacatggtgtatctgcaaatgaacagcctgaaacctgaggacacggccgtttattactgtgcagccacaaatttcctgatagcgactactatatctgcatatgacttctggggccaggggacccaggtcaccgtctcctca

SEQ ID NO: 2066 - DNA, 369 bp, synthetic construct
  source 1..369: mol_type = other DNA
gaggtgcagctggtggagtctgggggaggattggtgcaggctgggggctcgctgagcgtctcctgtgcagcctctggacgcactctcagtgggtatggcatgggctggttccgccaggctccaggggaggagcgtgagtttgtagcagctattagccagagtggtgggcgtacaaggtactcagactccgtgaagggccgattcaccatctccagagacaacgccaagtacatggtgtatctgcaaatgaacagcctgaaacctgaggacacggccatttattactgtgcagcctcaaatttcctgttagcgactactaactctgcatatgactactggggtcaggggacccaggtcaccgtctcctca

SEQ ID NO: 2067 - DNA, 369 bp, synthetic construct
  source 1..369: mol_type = other DNA
gaggtgcagctggtggagtctgggggaggattggtgcaggctgggggctcgctgagactctcctgtgcagcctctggacgcaccttcagtagctatggcatgggctggttccgccaggctccaggagaggagcgtgagtttgtagcagctattagtcagagtggtgggcgtacaaggtactcagactccgtgaagggccgattcaccatctccagagacaacgccaagaacatggtgtatctgcaaatgaacagcctgaaacctgaggacacggccgtttattactgtgcagccacaaatttccggatagcgactactatatctgcatatgactactggggccaggggacccaggtcaccgtctcctca

SEQ ID NO: 2068 - DNA, 369 bp, synthetic construct
  source 1..369: mol_type = other DNA
gaggtgcagctggtggagtctgggggaggattggtgcaggctgggggctcgctgagactctcctgtgcagcctctggacgcaccttcagtagctatggcatgggctggttccgccaggctccaggagaggagcgtgagtttgtagcagctattagtcagagtggtgggcgtacaaggtactcagactccgtgaagggccgattcaccatctccagagacaacgccaagaacatggtgtatctgcaaatgaacagcctgaaacctgaggacacggccgtttattactgtgcagtcacaaatttcctgatagcgactactatatctgcatatgactactggggccaggggacccaggtcaccgtctcctca

SEQ ID NO: 2069 - DNA, 369 bp, synthetic construct
  source 1..369: mol_type = other DNA
gaggtgcagctggtggagtctgggggaggattggtgcaggctgggggctctctgagactctcctgtgcagcctctggacgcaccttcagtaactatggcatgggctggttccgccaggctccagggaaggagcgtgagtttgtagtagctattagtagcagtggtgggcgtacacgcttttcagactccgtgaagggccgattcaccatctccagagacaacgccaagaacatggtgtatctgcaaatgaacaacctgaaacctgaggacacggccgtttattactgtgcagcctcagatttcccgatagcggctactatatccgcatatgactactggggccaggggacccaggtcaccgtctcctca

SEQ ID NO: 2070 - DNA, 369 bp, synthetic construct
  source 1..369: mol_type = other DNA
gaggtgcagctggtggagtctgggggaggattggtgcaggctgggggctcgctgagactctcctgtgcagcctctggacgcaccttcagtagctatggcatgggctggttccgccaggctccaggagaggagcgtgagtttgtagcagctattagtcagagtggtgggcgtacaaggtactcagactccgtgaagggccgattcaccatctccagagacaacgccaagaacatggtgtatctgcaaatgaacagcctgaaacctgaggacacggccgtttattactgtgcagccacaaatttcctgatagcgactactatatctacatatgactactggggccaggggacccaggtcaccgtctcctca

SEQ ID NO: 2071 - DNA, 369 bp, synthetic construct
  source 1..369: mol_type = other DNA
gaggtgcagctggtggagtctgggggaggattggtgcaggctgggggctcgctgagaccctcctgtgcagcctctggacgcaccttcagtagctatggcatgggctggttccgccaggctccaggagaggagcgtgagtttgtagcagctattagtcagagtggtgggcgtacaaggtactcagactccgtgaagggccgattcaccatctccagagacaacgccaagaacatggtgtatctgcaaatgaacagcctgaaacctgaggacacggccgtttattactgtgcagccacaaatttcccgatagcgactactatatctgcatatgactactggggccaggggacccaggtcaccgtctcctca

SEQ ID NO: 2072 - DNA, 369 bp, synthetic construct
  source 1..369: mol_type = other DNA
gaggtgcagctggtggagtctgggggaggattggtgcaggctgggggctcgctgagactctcctgtgcagcctctggacgcaccttcagtagctatggcatgggctggttccgccaggctccaggagaggagcgtgagtttgtagcagctattagtcagagtggtgggcgtacaaggtactcagactccgtgaagggccgattcaccatctccagagacaacgccaagaacatggtgtatctgcaaatgaacagcctgaaacctgaggacacggccgtttattactgtgcagccacaaatttcctgatagcgactactatatttgcatatgactactggggccaggggacccaggtcaccgtctcctca

SEQ ID NO: 2073 - DNA, 369 bp, synthetic construct
  source 1..369: mol_type = other DNA
gaggtgcagctgctggagtctgggggaggattggtgcaggctgggggctcgctgagcgtctcctgtgcagcctctggacgcactctcagtgggtatggcatgggctggttccgccaggctccaggggaggagcgtgagtttgtagcagctattagccagagtggtgggcgtacaaggtactcagactccgtgaagggccgattcaccatctccagagacaacgccaagaacatggtgtatctgcaaatgaacagcctgaaacctgaggacacggccatttattactgtgcagcctcaaatttcctgttagcgactactaactctgcatatgactactggggtcaggggacccaggtcaccgtctcctca

SEQ ID NO: 2074 - DNA, 369 bp, synthetic construct
  source 1..369: mol_type = other DNA
gaggtgcagctggtggagtctgggggaggattggtgcaggctgggggctcgctgagcgtctcctgtgcagcctctggacgcaccttcagttggaatggtatgggctggttccgccaggctccaggagaggagcgtgagtttgtagcagctattagtcaaagtggtgggcgtacaaggtactcagactccgtgaagggccgattcaccatctccagagacaacaccaagaatatggtgtatctgcaaatgaacagcctgaaacctgaggacacggccgtttattactgtgcagcctcagatttcctgttagcgactactacatctgcatatgactactggggccaggggacccaggtcaccgtctcctca

SEQ ID NO: 2075 - DNA, 369 bp, synthetic construct
  source 1..369: mol_type = other DNA
gaggtgcagctggtggagtctgggggaggattggtgcaggctgggggctcgctgagcgtctcctgtgcagcctctgaacacactctcagtgggtatggcatgggctggttccgccaggctccaggggaggagcgtgagtttgtagcagctattagccagagtggtgggcgtacaaggtactcagactccgtgaagggccgattcaccatctccagagacaacgccaagaacatggtgtatctgcaaatgaacagcctgaaacctgaggacacggccatttattactgtgcagcctcaattttcctgttagcgactactaactctgcatatgactactggggtcaggggacccaggtcaccgtctcctca

SEQ ID NO: 2076 - DNA, 369 bp, synthetic construct
  source 1..369: mol_type = other DNA
gaggtgcagctggtggagtctgggggaggattggtgcaggctgggggctcgctgagactctcctgtgcagcctctggacgcaccttcagtagctatggcatgggctggttccgccaggctccaggagaggagcgtgagtttgtagcagctattagtcagagtggtgggcgtacaaggtactccgactccgtgaagggccgattcaccatctccagagacaacgccaagaacatggtgtatctgcaaatgaacagcctgaaacctgaggacacggccgtttattactgtgcagccacaattttcctgatagcgactactatatctgcatatgactactggggccaggggacccaggtcaccgtctcctca

SEQ ID NO: 2077 - DNA, 369 bp, synthetic construct
  source 1..369: mol_type = other DNA
gaggtgcagctggtggagtctgggggaggattggtgcaggctgggggctcgctgagactctcctgtgcagcctctggacgcaccttcagtagctatggcatgggctggttccgccaggctccaggagaggagcgtgagtttgtagcagctattagtcagagtggtgggcgtacaaggtactcagactccgtgaagggccgattcaccatctccagagacaacgccaagaacatggtgtatctgcaaatgaacagcctgaaacctgaggacacggccgtttattactgtgcagcctcaaatttcctgatagcgactactatatctgcatatgactactggggccaggggacccaggtcaccgtctcctca

SEQ ID NO: 2078 - DNA, 369 bp, synthetic construct
  source 1..369: mol_type = other DNA
gaggtgcagctggtggagtctgggggaggattggtgcaggctgggggctcgctgagactctcctgtgcagcctctggacgcaccttcagtagctatggcatgggctggttccgccaggctccaggagaggagcgtgagtttgtagcagctattagtcagagtggtgggcgtacaaggtactcagactccgtgaagggccgattcaccatctccagagacaacgccaagaacatggtgtatctgcaaatgaacagcctgaaacctgaggacacggccgtttattactgtgcagccacaaatttcctgatagagactactatatctgcatatgactactggggccaggggacccaggtcaccgtctcctca

SEQ ID NO: 2079 - DNA, 369 bp, synthetic construct
  source 1..369: mol_type = other DNA
gaggtgcagctggtggagtctgggggaggattggtgcaggctgggggctcgctgagactctcctgtgcagcctctggacgcaccttcagtagctatggcatgggctggttccgccaggctccaggagaggagcgtgagttcgtagcagctattagtcagagtggtgggcgtacaaggtactcagactccgtgaagggccgattcaccatctccagagacaacgccaagaacatggtgtatctgcaaatgaacagcctgaaacctgaggacacggccgtttattactgtgcagccacaaatttcctgatagcgactactatatctgcatatgcctactggggccaggggacccaggtcaccgtctcctca

SEQ ID NO: 2080 - DNA, 369 bp, synthetic construct
  source 1..369: mol_type = other DNA
gaggtgcagctggtggagtctgggggaggattggtgcaggctgggggctcgctgagactctcctgtgcagcctctggacgcaccttcagtagctatggcatgggctggttccgccaggctccaggagaggagcgtgagtttgtagcagctattagtcagagtggtgggcgtacaaggtactcagactccgtgaagggccgattcaccatctccagagacaacgccaagaacatggtgtatctgcaaatgaacagcctgaaacctgaggacacggccgtttattactgtgcagccacatatttcctgatagcgactactatatctgcatatgactactggggccaggggacccaggtcaccgtctcctca

SEQ ID NO: 2081 - DNA, 369 bp, synthetic construct
  source 1..369: mol_type = other DNA
gaggtgcagctggtggagtctgggggaggattggtgcaggctgggggctcgctgagactctcctgtgcagcctctggacgcaccttcagtagctatggcatgggctggttccgccaggctccaggagaggagcgtgagtttgtagcagctattagtcagagtggtgggcgtacaaggtactcagactccgtgaagggccgattcaccatctccagagacaacgccaagaacatggtgtatctgcaaatgaacagcctgaaacctgaggacacggccgtttattactgtgcagccacaaatttcctgatagcgactactatatctgcatttgactactggggccaggggacccaggtcaccgtctcctca

SEQ ID NO: 2082 - DNA, 369 bp, synthetic construct
  source 1..369: mol_type = other DNA
gaggtgcagctggtggagtctgggggaggattggtgcaggctgggggctcgctgagactctcctgtgcagcctctggacgcaccttcagtagctatggcatgggctggttccgccaggctccaggagaggagcgtgagtttgtagcagctattagtcagagtggtgggcgtacaaggtactcagactccgtgaagggccgattcaccatctccagagacaacgccaagaacatggtgtatctgcaaatgaacagcctgaaacctgaggacacggccgtttattactgtgcagccacaaatttcctgatagcgacttctatatctgcatatgactactggggccaggggacccaggtcaccgtctcctca

SEQ ID NO: 2083 - DNA, 369 bp, synthetic construct
  source 1..369: mol_type = other DNA
gaggtgcagctggtggagtctgggggaggattggtgcaggctgggggctctctgagactctcctgtgcagcctctggacgcaccttcgctagctttggcatgggctggttccgccaggctatagggaaggagcgtgaatttgtagcaggtattagtcagagtggtggacgtacaaggtattcagactccgtgaagggccgattcaccatctccagagacgacgccaagaacatggtgtatctgcaaatgaacagcctgaaacctgaggacacggccgcttattactgtgcagcctcgtatttcctgatagcgaatactatatctggatatgactactggggccaggggacccaggtcaccgtctcctca

SEQ ID NO: 2084 - DNA, 369 bp, synthetic construct
  source 1..369: mol_type = other DNA
gaggtgcagctggtggagtctgggggaggattggtgcaggctgggggctctctgagactctcctgtgcagcctctggacgcaccttcagtagctatggcatgggctggttccgccaggctccagggaaggagcgtgagtttgtagtagctattagtggaagtggtgggcgtacacgcttttcagactccgtcaagggccgattcaccatctccagagacaacgccgagaacatggtgtatctgcaaatgaacagcctgaaacctgaggacacggccgtttattactgtgcagccacagatttcttgatagcgactactatatccgcatatgactactggggccaggggacccaggtcaccgtctcctca

SEQ ID NO: 2085 - DNA, 369 bp, synthetic construct
  source 1..369: mol_type = other DNA
gaggtgcagctggtggagtctgggggaggattggtgcaggctgggggctctctgagactctcctgtgcagcctctggacgcaccttcagtagctatggcatgggctggttccgccaggctccagggaaggagcgtgaatttgtagtagcgattagtgggggtggtgggcgtacacgcttttcagactccgtgaagggccgattcaccatctccagagacaacgccaagaacatggtgtatctgcaaatgaacagcctgaaacctgaggacacggccgtttattactgtgcaggctccgatttcttgatggcgactactatatccgcatatgactactggggccaggggacccaggtcaccgtctcctca

SEQ ID NO: 2086 - DNA, 369 bp, synthetic construct
  source 1..369: mol_type = other DNA
gaggtgcagctggtggagtctgggggaggattggtgcaggctgggggctcgctgagcgtctcctgtgcagcctctggacgcaccttcagttggtatggcatgggctggttccgccaggctccaggagaggggcgtgtgtttgtagcagctattagtcacagtggtgggcgtacaaggtactcagactccgtgaagggccgattcaccatctccagagacaacgccaagaacatggtgtatctgcaaatgaacagcctgaaacctgaggacacggccgtttattactgtgcagcctcagatttcctgatagcgactactgtatctgcatatgactactggggccaggggacccaggtcaccgtctcctca

SEQ ID NO: 2087 - DNA, 369 bp, synthetic construct
  source 1..369: mol_type = other DNA
gaggtgcagctggtggagtctgggggaggattggtgcaggctgggggctctctgagactctcctgtgcagcctctggacgcaccttcagtagctatggcatgggctggttccgccaggctccagggaaggagcgtgaatttgtagtagccattagtgggggtggtgggcgtacacgcttttcagactccgtgaagggccgattcaccatctccagagacaacgccaagaacatggtgtatctgcaaatgaacagcctgaaacctgaggacacggccgtttattactgtgcagcctccgatttcttgatagcgactactgtatccgcatatgactactggggccaggggacccaggtcaccgtctcctca

SEQ ID NO: 2088 - DNA, 369 bp, synthetic construct
  source 1..369: mol_type = other DNA
gaggtgcagctggtggagtctgggggaggattggtgcaggctgggggctcgctgagactctcctgtgcagcctctggacgcaccttcagtagctatggcatgggctggttccgccaggctccaggagaggagcgtgagtttgtagcagctattagtcagagtggtgggcgtacaaggtactcagactccgtgaagggccgattcaccatctccagagacaacgccaagaacatggtgtatctgcaaatgaacagcctgaaacctgaggacacggccgtttattactgtgcagccacaaatttcctgatagcgactaatatatctgcatatgactactggggccaggggacccaggtcaccgtctcctca

SEQ ID NO: 2089 - DNA, 369 bp, synthetic construct
  source 1..369: mol_type = other DNA
gaggtgcagctggtggagtctgggggaggattggtgcaggctgggggctcgctgagactctcctgtgcagcctctggacgcaccttcagtagctatggcatgggctggttccgccaggctccaggagaggggcgtgagtttgtagcagctattagtcagagtggtgggcgtacaaggtactcagactccgtgaagggccgattcaccatatccagagacaacgccaagaacatggtgtatctgcaaatgcacagcctgaaacctgaggacacggccgtttattactgtgcagccacagatttcctgatagcgactactatatctgcatatgactactggggccaggggacccaggtcaccgtctcctca

SEQ ID NO: 2090 - DNA, 369 bp, synthetic construct
  source 1..369: mol_type = other DNA
gaggtgcagctggtggagtctgggggaggattggtgcaggctgggggctctctgagactctcctgtgcagcctctggacgcaccttcagtagctatggcatgggctggttccgccaggctccagggaaggagcgtgaatttgtagtagccattagtgggggtggtgggcgtacacgcttttcagactccgtgaagggccgattcaccatctccagagacaacgccaagaacatggtgtatctgcaaatgaacagcctgaaacctgaggacacggccgtttattactgtgcagcctccgatttctcgatagcgactactatatccgcatatgactactggggccaggggacccaggtcaccgtctcctca

SEQ ID NO: 2091 - DNA, 369 bp, synthetic construct
  source 1..369: mol_type = other DNA
gaggtgcagctggtggagtctgggggaggattggtgcaggctgggggctcgctgagcgtctcctgtgcagcctctggacgcaccttcagttggaatggtatgggctggttccgccaggctccaggagaggagcgtgagtttgtagcagctattagtcaaagtggtgggcgtacaaggtactcagactccgtgaagggccgattcaccatctccagagacaacgccaagaatatggtgtatctgcaaatgaacagcctgaaacctgaggacacggccgtttattactgtgcagcctcagatttcctgttagcgactactatgtctgcatatgtctactggggccaggggacccaggtcaccgtctcctca

SEQ ID NO: 2092 - DNA, 369 bp, synthetic construct
  source 1..369: mol_type = other DNA
gaggtgcagctggtggagtctgggggaggattggtgcaggctgggggctctctgagactctcctgtgcagcctctggacgcaccttcactagctttggcatgggctggttccgccaggctatagggaaggagcgtgaatttgtagcagctattagtcggagtggtggacgtacaaggtattcagactccgtgaagggccgattcaccatctccagagacgacgccaagaacatggtgtatctgcaaatgaacagcctgaaacctgaggacacggccgtttattactgtgcagcctcatatttccttctagcgattactatatctggatatgactactggggccaggggacccaggtcaccgtctcctca

SEQ ID NO: 2093 - DNA, 369 bp, synthetic construct
  source 1..369: mol_type = other DNA
gaggtgcagctggtggagtctgggggaggattggtgcaggctgggggctcgctgagcgtctcctgtgcagcctctggacgcactctcagtgggtatggcatgggctggttccgccaggctccagggggggagcgtgagtttgtagcagctattagccagagtggtgggcgtacaaggtactcagactccgtgaagggccgattcaccatctccagagacaacgccaagaacatggtgtatctgcaaatgaacagcctgaaacctgaggacacggccatttattactgtgcagcctcaaatttcctgttagcgactactaactctgcatatggctactggggtcaggggacccaggtcaccgtctcctca

SEQ ID NO: 2094 - DNA, 369 bp, synthetic construct
  source 1..369: mol_type = other DNA
gaggtgcagctggtggagtctgggggaggattggtgcaggctgggggctcgctgagcgtctcctgtgcagcctctggacgcactctcagtgggtatggcatgggctggttccgccaggctccaggggaggagcgtgagtttgtagcagctattagccagagtggtgggcgtacaaggtactcagactccgtgaagggccgattcaccatctccagagacaacgccaagaacatggtgtatctgcaaatgaacagcctgaaacctggggacacggccatttattactgtgcagcctcaaatttcctgttagcgactactaactctgcatatgactactggggtcaggggacccaggtcaccgtctcctca

SEQ ID NO: 2095 - DNA, 369 bp, synthetic construct
  source 1..369: mol_type = other DNA
gaggtgcagctggtggagtctgggggaggattggtgcaggctgggggctcgctgagcgtctcctgtgcagcctctggacgcaccttcagttggaatggtatgggctggttccgccaggctccaggagaggagcgtgagtttgtagcagctattagtcaaagtggtgggcgtacaaggtactcagactccgtgaagggccgattcaccatctccagagacaacgccaagaatatggtgtatctgcaaatgaacagcctgagacctgaggacacggccgtttattactgtgcagcctcagatttcctgttagcgactactatatctgcatatgactactggggccaggggacccaggtcaccgtctcctca

SEQ ID NO: 2096 - DNA, 369 bp, synthetic construct
  source 1..369: mol_type = other DNA
gaggtgcagctggtggagtctgggggaggattggtgcaggctgggggctcgctgagcgtctcctgtgcagcctctggacgcaccttcagttggaatggtatgggctggttccgccaggctccaggagaggagcgtgagtttgtagcagctattagtcaaagtggtgggcgtacaaggtactcagactccgtgaagggccgattcaccatctccagagacaacgccaagaatagggtgtatctgcaaatgaacagcctgaaacctgaggacacggccgtttattactgtgcagcctcagatttcctgttagcgactactatatctgcatatgactactggggccaggggacccaggtcaccgtctcctca

SEQ ID NO: 2097 - DNA, 369 bp, synthetic construct
  source 1..369: mol_type = other DNA
gaggtgcagctggtggagtctgggggaggattggtgcaggctgggggctcgctgagcgtctcctgtgcagcctctggacgcaccttcagttggaatggtatgggctggttccgccaggctccaggagaggagcgtgagtttgtagcagctattagtcaaagtggtgggcgtacaaggtactcagactccgtgaagggccgattcaccatctccagagacaacgccaagaatatggtgtatctgcgaatgaacagcctgaaacctgaggacacggccgtttattactgtgcagcctcagatttcctgttagcgactactatatctgcatatgactactggggccaggggacccaggtcaccgtctcctca

SEQ ID NO: 2098 - DNA, 369 bp, synthetic construct
  source 1..369: mol_type = other DNA
gaggtgcagctggtggagtctgggggaggattggtgcaggctgggggctcgctgagcgtctcctgtgcagcctctggacgcaccttcagtcggaatggtatgggctggttccgccaggctccaggagaggagcgtgagtttgtagcagctattagtcaaagtggtgggcgtacaaggtactcagactccgtgaagggccgattcaccatctccagagacaacgccaagaatatggtgtatctgcaaatgaacagcctgaaacctgaggacacggccgtttattactgtgcagcctcagatttcctgttagcgactactatatctgcatatgactactggggccaggggacccaggtcaccgtctcctca

SEQ ID NO: 2099 - DNA, 369 bp, synthetic construct
  source 1..369: mol_type = other DNA
gaggtgcagctggtggagtctgggggaggattggtgcaggctgggggctcgccgagcgtctcctgtgcagcctctggacgcaccttcagttggaatggtatgggctggttccgccaggctccaggagaggagcgtgagtttgtagcagctattagtcaaagtggtgggcgtacaaggtactcagactccgtgaagggccgattcaccatctccagagacaacgccaagaatatggtgtatctgcaaatgaacagcctgaaacctgaggacacggccgtttattactgtgcagcctcagatttcctgttagcgactactatatctgcatatgactactggggccaggggacccaggtcaccgtctcctca

SEQ ID NO: 2100 - DNA, 369 bp, synthetic construct
  source 1..369: mol_type = other DNA
gaggtgcagctggtggagtctgggggaggattggtgcaggctgggggctctctgagactctcctgtgcagcctctggacgcaccttcagtagctatggcatgggctggttccgccaggctccagggaaggagcgtgagtttgtagtagctattagtgggagtggtgggcgtacacgcttttcagactccgtgaagggccgattcaccatctccagagacaacgccaagaacatggtgtatctgcaaatgaacagcctgaaacctgaggacacggccgtttattactgtgcagcctcggatttctttatagcgactagtatatccgcatatgactactggggccaggggacccaggtcaccgtctcctca

SEQ ID NO: 2101 - DNA, 369 bp, synthetic construct
  source 1..369: mol_type = other DNA
gaggtgcagctggtggagtctgggggaggattggtgcaggctgggggctctctgagactctcctgtgcagcctctggacgcaccttcagtagctatggcatgggctggttccgccaggctccagggaaggagcgtgagtttgtagtagctattagtgggggtggtgggcgtacacgcttttcagactccgtgaagggccgattcaccatctccagagacaacgccgagagcatggtgtatctgcaaatgaacagcctgaaacctgaggacacggccgtttattactgtgcagcctcagatttcttgatagcgactactttatccgcatatgactactggggccaggggacccaggtcaccgtctcctca

SEQ ID NO: 2102 - DNA, 369 bp, synthetic construct
  source 1..369: mol_type = other DNA
gaggtgcagctggtggagtctgggggaggattggtgcaggctgggggctcgctgagcgtctcctgtgcagcctctggacgcactctcagtgggtatggcatgggctggttccgccaggctccaggggaggagcgtgagtttgtagcagctattagccagagtggtgggcgtacaaggtactcagaccccgtgaagggccgattcaccatctccagagacaacgccaagaacatggtgtatctgcaaatgaacagcctgaaacctgaggacacggccatttattactgtgcagcctcaaatttcctgttagcgactactaactctgcatatgactactggggtcaggggacccaggtcaccgtctcctca

SEQ ID NO: 2103 - DNA, 369 bp, synthetic construct
  source 1..369: mol_type = other DNA
gaggtgcagctggtggagtctgggggaggattggtgcaggctgggggctctctgagactctcctgtgcagcctctggacgcaccttcagtagctatggcatgggctggttccgccaggctccagggaaggagcgtgagtttgtagtagctattagtgggagtggtgggcgtacacgcttttcagactccgtgaagggccgattcaccatctccagagacaacgccaagaacatggtgtatctgcaaatgaacagcctgaaacctgaggacacggccgtttattactgtgcagcctcatatttcttgatagcgactacgttatccgcatatgactactggggccaggggacccaggtcaccgtctcctca

SEQ ID NO: 2104 - DNA, 369 bp, synthetic construct
  source 1..369: mol_type = other DNA
gaggtgcagctggtggagtctgggggaggattggtgcaggctgggggctcgctgagactctcctgtgcagcctctggacgcaccttcagtagctatggcatgggctggttccgccaggctccaggagaggagcgtgagtttgtagcagctattagtcagagtggtgggcgtacaaggtactcagactccgtgaagggccgattcaccatctccagagacaacgccaagaacatggtgtatctgcaaatgaacagcctgaaacctgaggacacggccgtttattactgtgcagccacaaatttcctgatagcgactactagatctgcatatgactactggggccaggggacccaggtcaccgtctcctca

SEQ ID NO: 2105 - DNA, 369 bp, synthetic construct
  source 1..369: mol_type = other DNA
gaggtgcagctggtggagtctgggggaggattggtgcaggctgggggctctctgagactctcctgtgcagcctctggacgcaccttcgctagctttggcatgggctggttccgccaggctatagggaaggagcgtgaatttgtagcagctattagtcggagtggtggacgtacacggtattcagactccgtgaagggccgattcaccatctccagagacgacgccaagaacagggtgtatctgcaaatgaacagcctgaaacctgaggacacggccgtttattactgtgcagcctcatatttcctactagcgactactatgtctggatatgacttctggggccaggggacccaggtcaccgtctcctca

SEQ ID NO: 2106 - DNA, 369 bp, synthetic construct
  source 1..369: mol_type = other DNA
gaggtgcagctggtggagtctgggggaggattggtgcaggctgggggctctctgagactctcctgtgcagcctctggacgcaccttcgctagctttggcatgggctggttccgccaggctatagggaaggagcgtgaatttgtagcagctattagtcggagtggtggacgtacaaggtattcagactccgtgaagggccgattcaccatctccagagacgacgccaagaacagggtgtatctgcaaatgaacagcctgaaacctgaggacacggccgtttattactgtgcagcctcatatttcctactagcgactactatatttggatatgacttctggggccaggggacccaggtcaccgtctcctca

SEQ ID NO: 2107 - DNA, 369 bp, synthetic construct
  source 1..369: mol_type = other DNA
gaggtgcagctggtggagtctgggggaggattggtgcaggctgggggctcgctgagcgtctcctgtgcagcctctagacgcactctcagtgggtatggcatgggctggttccgccaggctccaggggaggagcgtgagtttgtagcagctattagccagagtggtgggcgtacaaggtactcagactccgtgaagggccgattcaccatctccagagacgacgccaagaacatggtgtatctgcaaatgaacagcctgaaacctgaggacacggccatttattactgtgcagcctcaaatttcctgttagcgactactaactctgcatatgactactggggtcaggggacccaggtcaccgtctcctca

SEQ ID NO: 2108 - DNA, 369 bp, synthetic construct
  source 1..369: mol_type = other DNA
gaggtgcagctggtggagtctgggggaggattggtgcaggctgggggctcgctgagcgtctcctgtgcagcctctggacgcaccttcagttggaatggtatgggctggttccgccaggctccaggagaggagcgtgagtttgtagcagctattagtcaaagtggtgggcgtacaaggtactcagactccgtgaagggccgattcaccatctccagagacaacgccaagaatatggtgtatctgcaaatgaacagcctgaaacctgaggacacggccgtttattactgtgcagcctcagattccctgttagcgactactatacctgcatatgactactggggccaggggacccaggtcaccgtctcctca

SEQ ID NO: 2109 - DNA, 369 bp, synthetic construct
  source 1..369: mol_type = other DNA
gaggtgcagctggtggagtctgggggaggattggtgcaggctgggggctcgctgagactctcctgtgcagcctctggacgcaccttcagtagctatggcatgggctggttccgccaggctccaggagaggagcgtgagtttgtagcagctattagtcagggtggtgggcgtacaaggtactcagactccgtgaagggccgattcaccatctccagagacaacgccaagaacatggtgtatctgcaaatgaacagcctgaaacctgaggacacggccgtttattactgtgcagccacaaatttcctgttagcgactactatatctgcatatgactactggggccaggggacccaggtcaccgtctcctca

SEQ ID NO: 2110 - DNA, 369 bp, synthetic construct
  source 1..369: mol_type = other DNA
gaggtgcagctggtggagtctgggggaggattggtgcaggctgggggctcgctgagactctcctgtgcagcctctggacgcaccttcagtagctatggcatgggctggttccgccaggctccaggagaggagcgtgagtttgtagcagctattagtcagagtggtgggcgtacaaggtactcagactccgtgaagggccgattcaccatctccagagacaacgccgagaacatggtgtatctgcaaatgaacagcctgaaacctgaggacacggccgtttattactgtgcagccactaatttcctgatagcgactactatatctgcatataactactggggccaggggacccaggtcaccgtctcctca

SEQ ID NO: 2111 - DNA, 369 bp, synthetic construct
  source 1..369: mol_type = other DNA
gaggtgcagctggtggagtctgggggaggattggtgcaggctgggggctcgctgagactctcctgtgcagcctctggacgcaccttcagtagctatggcatgggctggttccgccaggctccaggagaggagcgtgagtttgtagcagctattagtcagagtggtgggcgtacaaggtactcagactccgtgaagggccgattcaccatctccagagacaacgccaagaacatggtgtatctgcaaatgaacagcctgaaacctgaggacacggccgtttattactgtgcagccacaaatttccagatagcgactactatatctgcatatgactactggggccaggggacccaggtcaccgtctcctca

SEQ ID NO: 2112 - DNA, 369 bp, synthetic construct
  source 1..369: mol_type = other DNA
gaggtgcagctggtggagtctgggggaggattggtgcaggctgggggctcgctgagactctcctgtgcagcctctggacgcaccttcagtagctatggcatgggctggttccgccaggctccaggagaggagcgtgagtttgtagcagctattagtcagagtggtgggcgtgcaaggtactcagactccgtgaagggccgattcaccatctccagagacaacgccaagaacatggtgtatctgcaaatgaacagcctgaaacctgaggacacggccgtttattactgtgcagccacaaatttcctgatagcggctactatatctgcatatgactactggggccaggggacccaggtcaccgtctcctca

SEQ ID NO: 2113 - DNA, 369 bp, synthetic construct
  source 1..369: mol_type = other DNA
gaggtgcagctggtggagtctgggggaggattggtgcaggctgggggctcgctgagactctcctgtgcagcctctggacgcaccttcagtagctatggcatgggctggttccgccaggctccaggagaggagcgtgagtttgtagcagctattagtcagagtggtgggcgtacaaggtactcagactccgtgaagggccgattcaccatctccagagacaacgccaagaacatggtgtatctgcaaatgaacagcctgaaacctgaggacacggccgtttattactgtgcagccacaaatttcctgatagcgactactgtatctgcatatgactactggggccaggggacccaggtcaccgtctcctca

SEQ ID NO: 2114 - DNA, 369 bp, synthetic construct
  source 1..369: mol_type = other DNA
gaggtgcagctggtggagtctggaggaggattggtgcaggctgggggctctctgagactctcctgtgcagcctctggacgcaccttcagtagctatggcatgggctggttccgccaggctccaggggaggagcgtgagtttgtagtagctattagtgggagtggtgggcgttcacgcttttcagactccgtgaagggccgattcaccatctccagagacaacgccaagaacatggtgtatctgcaaatgaacagcctgaaacctgaggacacggccgtttattactgtgcagcctcatatttcctgatggcgactagtatatccgcatatgactactggggccaggggacccaggtcaccgtctcctca

SEQ ID NO: 2115 - DNA, 369 bp, synthetic construct
  source 1..369: mol_type = other DNA
gaggtgcagctggtggagtctgggggaggattggtgcaggctgggggctctctgagactctcctgtgcagcctctggacgcaccttcgctagctttggcatgggctggttccgccaggctatagggaaggagcgtgaatttgtagcagctattagtcggagtggtggacgtacaaggtattcagactccgtgaagggccgattcaccatctccagagacgacgccaagaacagggtgtatctgcaaatgaacagcctgaaacctgaggacacggccgtttattactgtgcagcctcatatttcctactagcggctactatatctggatatgacttctggggccaggggacccaggtcaccgtctcctca

SEQ ID NO: 2116 - DNA, 369 bp, synthetic construct
  source 1..369: mol_type = other DNA
gaggtgcagctggtggagtctgggggaggattggtgcaggctgggggctctctgagactctcctgtgcagcctctggacgcaccttcgctagctttggcatgggctggttccgccaggctatagggaaggagcgtgaatttgtagcagctattagtcggagtggtggacgtacaaggtattcagactccgtgaagggccgattcaccatctccagagacgacgccaagaacagggtgtatctgcaaatgaacagcctgaaacctgaggacacggccgtttattactgtgcagcctcatatttcctacgagcgactactatatctggatatgacttctggggccaggggacccaggtcaccgtctcctca

SEQ ID NO: 2117 - DNA, 369 bp, synthetic construct
  source 1..369: mol_type = other DNA
gaggtgcagctggtggagtctgggggaggattggtgcaggctgggggctctctgagactctcctgtgcagcctctggacgcaccttcagtagctatggcatgggctggttccgccaggctccagggaaggagcgtgagtttgtagtagctattagtggaagtggtgggcgtacacgcttttcagactccgtcaagggccgattcaccatctccagggacaacgccgagaacatggtgtatctgcaaatgaacagcctgaaacctgaggacacggccgtttattactgtgcagcctcagatttcttgatagcgactactatatccgtatatgactactggggccaggggacccaggtcaccgtctcctca

SEQ ID NO: 2118 - DNA, 369 bp, synthetic construct
  source 1..369: mol_type = other DNA
gaggtgcagctggtggagtctgggggaggattggtgcaggctgggggctctctgagactctcctgtgcagcctctggacgcaccttcagtagctatggcatgggctggttccgccaggctccagggaaggagcgtgagtttgtagtagctattagtgggagtggtgggcgtacacgcttttcagactccgtgaagggccgattcaccatctccagagacaacgccaagaacatggtgtatctgcaaatgaacagcctgaaacctgaggacacggccgtttattactgtgcagcctcatatttcttggtagcgactagtatatccgcatatgactactggggccaggggacccaggtcaccgtctcctca

SEQ ID NO: 2119 - DNA, 369 bp, synthetic construct
  source 1..369: mol_type = other DNA
gaggtgcagctggtggagtctgggggaggattggtgcaggctgggggctcgctgagactctcctgtgcagcctctggacgcaccttcagtagctatggcatgggctggttccgccaggctccaggagaggagcgtgagtttgtagcagctattagtcagagtggtgggcgtacaaggtactcagactccgtgaagggccgattcacaatctccagagacaacgccaagaacatggtgtatctgcaaatgaacagcctgaaacctgaggacacggccgtttattactgtgcagccacaaatttcctgatagcgactactatatatgcatatgactactggggccaggggacccaggtcaccgtctcctca

SEQ ID NO: 2120 - DNA, 369 bp, synthetic construct
  source 1..369: mol_type = other DNA
gaggtgcagctggtggagtctgggggaggattggtgcaggctgggggctctctgagactctcctgtgcagcctctggacgcaccttcagtagctatggcatgggctggttccgccaggctccagggaaggagcgtgagtttgtagtcgctattagtggaagtggtgggcgtacacgcttttcagactccgccaagggccgattcaccatctccagagacaacgccgagaacatggtgtatctgcaaatgaacagcctgaaacctgaggacacggccgtttattactgtgcagcctcagatttcttgatagcgactactatatccgcatatgaccactggggccaggggacccaggtcaccgtctcctca

SEQ ID NO: 2121 - DNA, 369 bp, synthetic construct
  source 1..369: mol_type = other DNA
gaggtgcagctggtggagtctgggggaggattggtgcaggctgggggctctctgagactctcctgtgcagcctctggacgcaccttcagtagctatggcatgggctggttccgccaggctccagggaaggagcgtgaatttgtagtagctattagtgcgagtggtgggcgtacacgcttttcagactccgtgaagggccgattcaccatctccagagacaacgccaagaacatggtgtatctgcaaatgaacagcctgaaacctgaggacacggccgtttattactgtgcagcctcatatttcttgttagcgactactatgtccgcatatgactactggggccaggggacccaggtcaccgtctcctca

SEQ ID NO: 2122 - DNA, 369 bp, synthetic construct
  source 1..369: mol_type = other DNA
gaggtgcagctggtggagtctgggggaggattggtgcaggctgggggctcgctgagcgtctcctgtgcggcctctggacgcaccttcagttggtatggcatgggctggttccgccaggctccaggagaggagcgtgagtttgtagcggctattagtcagagtggtgggcgtacacgctactcagactccgtgaagggccgattcaccatctccagagacaacgccaagaacatggtgtatctgcaaatgaacagcctgaaacctgaggacacggccgtttattactgtgcagcctcagatttcctgttagcgactactatatctgcatatgactactggggccaggggacccaggtcaccgtctcctca

SEQ ID NO: 2123 - DNA, 369 bp, synthetic construct
  source 1..369: mol_type = other DNA
gaggtgcagctggtggagtctgggggaggattggtgcaggctgggggctctctgagactctcctgtgcagcctctggacgcaccttcgctagctttggcatgggctggttccgccaggctatagggaaggagcgtgaatttgtagcagctattagtcggagtggtggacgtacaaggtattcagactccgtgaagggccgattcaccatctccagagacgacgccaagaacagggtgtatctgcaaatgaacagcctgaaacctgaggacacggccgtttattactgtgcagcctcatatgtcctactagcgactactatatctggatatgacttctggggccaggggacccaggtcaccgtctcctca

SEQ ID NO: 2124 - DNA, 369 bp, synthetic construct
  source 1..369: mol_type = other DNA
gaggtgcagctggtggagtctgggggaggattggtgcaggctgggggctctctgagactctcctgtgcagcctctggacgcaccttcagtagctatggcatgggctggttccgccaggctccagggaaggagcgtgagtttgtagtagctattagtgggagtggtgggcgtacacgcttttcagactccgtgaagggccgattcaccatctccagagacaacgccaagaacatggtgtatctgcaaatgaacagcctgaaacctgaggacacggccgtttattactgtgcagcctcatatttcttgatggcgactagtatatccgcatatgactactggggccaggggacccaggtcaccgtctcctca

SEQ ID NO: 2125 - DNA, 369 bp, synthetic construct
  source 1..369: mol_type = other DNA
gaggtgcagctggtggagtctgggggaggattggtgcaggctgggggctctctgagactctcctgtgcagcctctggacgcaccttcgctagctttggcatgggctggttccgccaggctatagggagggagcgtgaatttgtagcaggtattagtcagagtggtggacgtacaaggtattcagactccgtgaagggccgattcaccatctccagagacgacaccaagaacatggtgtatctgcaaatgaacagcctgaaacctgaggacacggccgtttattactgtgcagcctcatatttcctgatagcgaatactatatctggatatgactactggggccaggggacccaggtcaccgtctcctca

SEQ ID NO: 2126 - DNA, 369 bp, synthetic construct
  source 1..369: mol_type = other DNA
gaggtgcagctggtggagtctgggggaggattggtgcaggctgggggctctctgagactctcctgtgcagcctctggacgcaccttcactagctttggcatgggctggttccgccaggctatagggaaggagcgtgaatttgtagcagctattagtcggagtggtggacgtacaaggtattcagactccgtgaagggccgattcaccatctccagagacgacgccaagaacatggtgtatctgcaaatgaacagcctgaaacctgaggacacggccgtttattactgtgcagcctcatctttcctactagcgattactatatctggatatgactactggggccaggggacccaggtcaccgtctcctca

SEQ ID NO: 2127 - DNA, 369 bp, synthetic construct
  source 1..369: mol_type = other DNA
gaggtgcagctggtggagtctgggggaggattggtgcaggctgggggctcgctgagcgtctcctgtgcagcctctggacgcaccttcagttggaatggtatgggctggttccgccaggctccaggggaggagcgtgagtttgtagcagctattagccagagtggtgggcgtacaaggtactcagactccgtgaagggccgattcaccatctccagagacaacgccaagaacatggtgtatctgcaaatgaacagcctgaaacctgaggacacggccatttattactgtgcagcctcaaatttcctgttagcgactactaactctgcatatgactactggggtcaggggacccaggtcaccgtctcctca

SEQ ID NO: 2128 - DNA, 369 bp, synthetic construct
  source 1..369: mol_type = other DNA
gaggtgcagctggtggagtctgggggaggattggtgcaggctgggggctctctgagactctcctgtgcagcctctggacgcaccttcagtagctatggcatgggctggttccgccaggctccagggaaggagcgtgaatttgtagtagccattagtgggggtggtgggcgtacacgcttttcagactccgtgaagggccgattcaccatctccagagacaacgccaagaacatggtgtatctgcaaatggacagcctgaaacctgaggacacggccgtttattactgtgcagcctccgatttcttgatagcgactactatacccgcatatgactactggggccaggggacccaggtcaccgtctcctca

SEQ ID NO: 2129 - DNA, 369 bp, synthetic construct
  source 1..369: mol_type = other DNA
gaggtgcagctggtggagtctgggggaggattggtgcaggctgggggctcgctgagcgtctcctgtgcagcctctggacgcaccttcagttggaatggtatgggctggttccgccaggctccaggagaggagcgtgagttcgtagcagctattagtcaaagtggtgggcgtacaaggtactcagactccgtgaagggccgattcaccatctccagagacaacgccaagaatatggtgtatctgcaaatgaacagcctgaaacctgaggacacggccgtttattactgtgcagcctcagatttcctgttagcgactactatatctggatatgacttctggggccaggggacccaggtcaccgtctcctca

SEQ ID NO: 2130 - DNA, 369 bp, synthetic construct
  source 1..369: mol_type = other DNA
gaggtgcagctggtggagtctgggggaggattggtgcaggctgggggctcgctgagactctcctgtgcagcctctggacgcaccttcagtagctatggcatgggctggttccgccaggctccaggagaggagcgtgagtttgtagcagctattagtcagagtggtgggcgtacaaggtactcagactccgtgaagggccgattcaccatctccagagacaacgccaagaacatggtgtatctgcaaatgaacagcctgaaacctgaggacacggccgtttattactgtgcagccacagatttcctgatagcgactactatatctgcatatgactactggggccaggggacccaggtcaccgtctcctca

SEQ ID NO: 2131 - DNA, 369 bp, synthetic construct
  source 1..369: mol_type = other DNA
gaggtgcagctggtggagtctgggggaggattggtgcaggctgggggctcgctgagactctcctgtgcagcctctggacgcaccttcagtagctatggcatgggctggttccgccaggctccaggagaggagcgtgagtttgtagcagctattagtcagagtggtgggcgaacaaggtactcagactccgtgaagggccgattcaccatctccagagacaacgccaagaacatggtgtatctgcaaatgaacagcctgaaacctgaggacacggccgtttattactgtgcagccacaaatttcctgatagcgactactatatctgaatatgactactggggccaggggacccaggtcaccgtctcctca

SEQ ID NO: 2132 - DNA, 369 bp, synthetic construct
  source 1..369: mol_type = other DNA
gaggtgcagctggtggagtctgggggaggattggtgcaggctgggggctcgctgagactctcctgtgcagcctctggacgcaccttcagtagctatggcatgggctggttccgccaggctccaggagaggagcgtgagtttgtagcagctattagtcagagtggtgggcgtacaaggtactcagactccgtgaagggccgattcaccatctccagagacaacgccaagaacatggtgtatctgcaaatgaacagcctgaaacctgaggacacggccgtttattactgtgcatccacaaatttcctgatagcgactactatatctgcatatgactactggggccaggggacccaggtcaccgtctcctca

SEQ ID NO: 2133 - DNA, 369 bp, synthetic construct
  source 1..369: mol_type = other DNA
gaggtgcagctggtggagtctgggggaggattggtgcaggctgggggctcgctgagactctcctgtgcagcctctggacgcaccttcagtagctatggcatgggctggttccgccaggctccaggagaggagcgtgagtttgtagcagctattagtcagagtggtgggcgtacaaggtactcagactccgtgaagggccgattcaccatctccagagacaacgccaagaacatggtgtatctgcaaatgaacagcctgaaacctgaggacacggccgtttattactgtgcagccacaaatttcctgatagcgactactttatctgcatatgactactggggccaggggacccaggtcaccgtctcctca

SEQ ID NO: 2134 - DNA, 369 bp, synthetic construct
  source 1..369: mol_type = other DNA
gaggtgcagctggtggagtctgggggaggattggtgcaggctgggggctcgctgagactctcctgtgcagcctctggacgcaccttcagtagctatggcatgggctggttccgccaggctccaggagaggagcgtgagtttgtagcagctattagtcagagtggtgggcgtacaaggtactcagactccgtgaagggccgattcaccatctccagagacaacgccaagaacatggtgtatctgcaaatgaacagcctgaaacctgaggacacggccgtttattactgtgcagccacaaatttcctgatagcgactactatatctgcatatgtctactggggccaggggacccaggtcaccgtctcctca

SEQ ID NO: 2135 - DNA, 369 bp, synthetic construct
  source 1..369: mol_type = other DNA
gaggtgcagctggtggagtctgggggaggattggtgcaggctgggggctctctgagactctcctgtgcagcctctggacgcaccttcgctgactttggcatgggctggttccgccaggctatagggaaggagcgtgaatttgtagcagctattagtcggagtggtggacgtacaaggtactcagactccgtgaagggccgattcaccatctccagagacgacgccaagaacatggtgtatctgcaaatgaacagcctgaaacctgaggacacggccgtttattactgtgcagcctcatatttcctactagcgattactatatctgcatatgactactggggccaggggacccaggtcaccgtctcctca

SEQ ID NO: 2136 - DNA, 369 bp, synthetic construct
  source 1..369: mol_type = other DNA
gaggtgcagctggtggagtctgggggaggattggtgcaggctgggggctctctgagactctcctgtgcagcctctggacgcaccttcgctagctttggcatgggctggttccgccaggctatagggaaggagcgtgaatttgtagcagctattagtcggagtggtggacgtacaaggtattcagactccgtgaagggccgattcaccatctccagagacgacgccaagaacagggtgtatctgcaaatgaacagcctgaaacctgaggacacggccgtttattactgtgcagcctcatatctcctactagcgactactatatctggatatgacttctggggccaggggacccaggtcaccgtctcctca

SEQ ID NO: 2137 - DNA, 369 bp, synthetic construct
  source 1..369: mol_type = other DNA
gaggtgcagctggtggagtctgggggaggattggtgcaggctgggggctcgctgagactctcctgtgcagcctctggacgcaccttcagtagctatggcatgggctggttccgccaggctccaggagaggagcgtgagtttgtagcagctattagtcagagtggtgggcgtacaaggtacccagactccgtgaagggccgattcaccatctccagagacaacgccaagaacatggtgtatctgcaaatgaacagcctgaaacctgaggacacggccgtttattactgtgcagccacaaatttcctgatagcgactactatatctgcatttgactactggggccaggggacccaggtcaccgtctcctca

SEQ ID NO: 2138 - DNA, 369 bp, synthetic construct
  source 1..369: mol_type = other DNA
gaggtgcagctggtggagtctgggggaggattggtgcaggctgggggctcgctgagactctcctgtgcagcctctggacgcaccttcagtagctatggcatgggctggttccgccaggctccaggagaggagcgtgagtttgtagcagctattagtcagagtggtgggcgtacaaggtactcagactccgtgaagggccgattcaccatctccagagacaacgccaagaacatggtgtatctgcaaatgaacagcctgaaacctgaggacacggccgtttattactgtgcagccacaaatttcctgatatcgactactatatctgcatatgactactggggccaggggacccaggtcaccgtctcctca

SEQ ID NO: 2139 - DNA, 369 bp, synthetic construct
  source 1..369: mol_type = other DNA
gaggtgcagctggtggagtctgggggaggattggtgcaggctgggggctcgctgagcgtctcctgtgcagcctctggacgcaccttcagttggaatggtatgggctggttccgccaggctccaggagaggagcgtgagtttgtagcagctattagtcaaagtggtgggcgtacaaggtactcagactccgtgaagggccgattcaccatctccagagacaacgccaagaatatggtgtatctgcaaatgaacagcctgaaacctgaggacacggccgtttattactgtgcagcctcagatttcctgttagcgactactatgtctgcatatggctactggggccaggggacccaggtcaccgtctcctca

SEQ ID NO: 2140 - DNA, 369 bp, synthetic construct
  source 1..369: mol_type = other DNA
gaggtgcagctggtggagtcggggggaggattggtgcaggctgggggctcgctgagcgtctcctgtgcagcctctggacgcaccttcagttggaatggtatgggctggttccgccaggctccaggagaggagcgtgagtttgtagcagctattagtcaaagtggtgggcgtacaaggtactcagactccgtgaagggccgattcaccatctccagagacaacgccaagaatatggtgtatctgcaaatgaacagcctgaaacctgaggacacggccgtttattactgtgtagcctcagatttcctgttagcgactactatatctgcatatgactactggggccaggggacccaggtcaccgtctcctca

SEQ ID NO: 2141 - DNA, 369 bp, synthetic construct
  source 1..369: mol_type = other DNA
gaggtgcagctggtggagtctgggggaggattggtgcaggctgggggctctctgagactctcctgtgcagcctctggacgcaccttcgctagctttggcatgggctggttccgccaggctatggggaaggagcgtgaatttgtagcagctattagtcggagtggtggacgtacaaggtattcagactccgtgaagggccgattcaccatctccagagacgacgccaagaacagggtgtatctgcaaatgaacagcctgaaacctgaggacacggccgtttattactgtgcagcctcatatttcctactagcgactactatatctggatatgacttctggggccaggggacccaggtcaccgtctcctca

SEQ ID NO: 2142 - DNA, 369 bp, synthetic construct
  source 1..369: mol_type = other DNA
gaggtgcagctggtggagtctgggggaggattggtgcaggctgggggctctctgagactctcctgtgcagcctctggacgcaccttcgctagctttggcatgggctggttccgccaggctatagggaaggagcgtgaatttgtagcagctattagtcggagtggtggacgtacaaggtattcagactccgtgaagggccgattcaccatctccagagacggtgccaagaacagggtgtatctgcaaatgaacagcctgaaacctgaggacacggccgtttattactgtgcagcctcatatttcctactagcgactaccatatctggatatgacttctggggccaggggacccaggtcaccgtctcctca

SEQ ID NO: 2143 - DNA, 369 bp, synthetic construct
  source 1..369: mol_type = other DNA
gaggtgcagctggtggagtctgggggaggattggtgcaggctgggggctctctgagactctcctgtgcagcctctggacgcaccttcagtaactatggcatgggctggttccgccaggctccagggaaggagcgtgagtttgtagtagctattagtagcagtggtgggcgtacacgcttttcagactccgtgaagggccgattcaccatctccagagacaacgccaagaacatggtgtatctgcaaatgaacaacctgaaacctgaggacacggccgtttattactgtgcagcctcagatttcctgatagcgactactatatccgcatatgactactggggccaggggacccaggtcaccgtctcctca

SEQ ID NO: 2144 - DNA, 369 bp, synthetic construct
  source 1..369: mol_type = other DNA
gaggtgcagctggtggagtctgggggaggattggtgcaggctgggggctcgctgagactctcctgtgcagcctctggacgcaccttcagtagctatggcatgggctggttccgccaggctccaggagaggagcgtgagtttgtagcagctattagtcagagtggtgggcgtacaaggtactcagactccgtgaagggccgattcaccatctccagagacaacgccaagaacatggtgtatctgcaaatgaacggcctgaaacctgaggacacggccgtttattactgtgcagccacaaatttcctgataacgactactatatctgcatatgactactggggccaggggacccaggtcaccgtctcctca

SEQ ID NO: 2145 - DNA, 369 bp, synthetic construct
  source 1..369: mol_type = other DNA
gaggtgcagctggtggagtctgggggaggattggtgcaggctgggggctcgctgagactctcctgtgcagcctctggacgcaccttcagtagctatggcatgggctggttccgccaggctccaggagaggagcgtgagtttgtagcagctattagtcagagtggtgggcgtacaaggtactcagactccgtgaagggccgattcaccatctccagagacaacgccaagaacatggtgtatctgcaaatgaacagcctgaaacctgaggacacggccgtttattactgtgcagccacaaatttcctgatagcgactattatatctgcatatgactactggggccaggggacccaggtcaccgtctcctca

SEQ ID NO: 2146 - DNA, 369 bp, synthetic construct
  source 1..369: mol_type = other DNA
gaggtgcagctggtggagtctgggggaggattggtgcaggctgggggctcgctgagactctcctgtgcagcctctggacgcaccttcagtagctatggcatgggctggttccgccaggctccaggagaggagcgtgagtttgtagcagctattagtcagagtggtgggcgtacaaggtactcagactccgtgaagggccgattcaccatctccagagacaacgccaagaacatggtgtatctgcaaatgaacagcctgaaacctgaggacacggccgtttattactgtgcagccacaagtttcctgatagcgactactatatctgcatatgactactggggccaggggacccaggtcaccgtctcctca

SEQ ID NO: 2147 - DNA, 369 bp, synthetic construct
  source 1..369: mol_type = other DNA
gaggtgcagctggtggagtctgggggaggattggtgcaggctgggggctcgctgagactcccctgtgcagcctctggacgcaccttcagtagctatggcatgggctggttccgccaggctccaggagaggagcgtgagtttgtagcagctattagtcagagtggtgggcgtacaaggtactcagactccgtgaagggccgattcaccatctccagagacaacgccaagaacatggtgtatctgcaaatgaacagcctgaaacctgaggacacggccgtttattactgcgcagccacaaatttcctgacagcgactactatatctgcatatgactactggggccaggggacccaggtcaccgtctcctca

SEQ ID NO: 2148 - DNA, 369 bp, synthetic construct
  source 1..369: mol_type = other DNA
gaggtgcagctggtggagtctgggggaggattggtgcaggctgggggctcgctgagactctcctgtgcagcctctggacgcaccttcagtagctataacgtgggctggttccgccaggctccaggagaggagcgtgagtttgtagcagctattagtcagagtggtgggcgtacaaggtactcagactccgtgaagggccgattcaccatctccagagacaacgccaagaacatggtgtatctgcaaatgaacagcctgaaacctgaggacacggccgtttattactgtgcaaccacaaatttcctgatagcgactactatatctgcatatgactactggggccaggggacccaggtcaccgtctcctca

SEQ ID NO: 2149 - DNA, 369 bp, synthetic construct
  source 1..369: mol_type = other DNA
gaggtgcagctggtggagtctgggggaggattggtgcaggctgggggctctctgagactctcctgtgcagcctctggacgcaccttcgctagctttggcatgggctggttccgccaggctatagggaaggagcgtgaatttgtagcagctattagtcggagtggtggacgtacaaggtattcagactccgtgaagggccgattcaccatctccagagacgacgccaagaacagggtgtatctgcaaatgaacagcctgaaacctgaggacacggccgtttattactgtgcagcctcatatttcccactagcgactactatatctggatatgacttctggggccaggggacccaggtcaccgtctcctca

SEQ ID NO: 2150 - DNA, 369 bp, synthetic construct
  source 1..369: mol_type = other DNA
gaggtgcagctggtggagtctgggggaggattggtgcaggctgggggctcgctgagcgtctcctgtgcagcctctggacgcactctcagtgggtatggcatgggctggttccgccaggctccaggggaggagcgtgagtttgtggcagctattagccagagtggtgggcgtacaaggtactcagactccgtgaagggccgattcaccatctccagagacaacgccaagaacatggtgtatctgcaaatgaacagcctgaaacctgaggacgcggccatttattactgtgcagcctcaaatttcctgttagcgactgctaactctgcatatgactactggggtcaggggacccaggtcaccgtctcctca

SEQ ID NO: 2151 - protein, 5 aa, synthetic construct
GGGGS

SEQ ID NO: 2152 - protein, 15 aa, synthetic construct
GGGGSGGGGSGGGGS

SEQ ID NO: 2153 - protein, 20 aa, synthetic construct
GGSEGKSSGSGSESKSTGGS

SEQ ID NO: 2154 - protein, 8 aa, synthetic construct
GGGSGGGS

SEQ ID NO: 2155 - protein, 12 aa, synthetic construct
GGGSGGGSGGGS

SEQ ID NO: 2156 - protein, 16 aa, synthetic construct
GGGSGGGSGGGSGGGS

SEQ ID NO: 2157 - protein, 20 aa, synthetic construct
GGGSGGGSGGGSGGGSGGGS

SEQ ID NO: 2158 - protein, 20 aa, synthetic construct
GGGGSGGGGSGGGGSGGGGS

SEQ ID NO: 2159 - protein, 25 aa, synthetic construct
GGGGSGGGGSGGGGSGGGGSGGGGS

SEQ ID NO: 2160 - protein, 14 aa, synthetic construct
IRPRAIGGSKPRVA

SEQ ID NO: 2161 - protein, 15 aa, synthetic construct
GKGGSGKGGSGKGGS

SEQ ID NO: 2162 - protein, 15 aa, synthetic construct
GGKGSGGKGSGGKGS

SEQ ID NO: 2163 - protein, 15 aa, synthetic construct
GGGKSGGGKSGGGKS

SEQ ID NO: 2164 - protein, 15 aa, synthetic construct
GKGKSGKGKSGKGKS

SEQ ID NO: 2165 - protein, 15 aa, synthetic construct
GGGKSGGKGSGKGGS

SEQ ID NO: 2166 - protein, 15 aa, synthetic construct
GKPGSGKPGSGKPGS

SEQ ID NO: 2167 - protein, 20 aa, synthetic construct
GKPGSGKPGSGKPGSGKPGS

SEQ ID NO: 2168 - protein, 20 aa, synthetic construct
GKGKSGKGKSGKGKSGKGKS

SEQ ID NO: 2169 - protein, 14 aa, synthetic construct
STAGDTHLGGEDFD

SEQ ID NO: 2170 - protein, 15 aa, synthetic construct
GEGGSGEGGSGEGGS

SEQ ID NO: 2171 - protein, 15 aa, synthetic construct
GGEGSGGEGSGGEGS

SEQ ID NO: 2172 - protein, 15 aa, synthetic construct
GEGESGEGESGEGES

SEQ ID NO: 2173 - protein, 15 aa, synthetic construct
GGGESGGEGSGEGGS

SEQ ID NO: 2174 - protein, 20 aa, synthetic construct
GEGESGEGESGEGESGEGES

SEQ ID NO: 2175 - protein, 18 aa, synthetic construct
GSTSGSGKPGSGEGSTKG

SEQ ID NO: 2176 - protein, 19 aa, synthetic construct
PRGASKSGSASQTGSAPGS

SEQ ID NO: 2177 - protein, 19 aa, synthetic construct
GTAAAGAGAAGGAAAGAAG

SEQ ID NO: 2178 - protein, 19 aa, synthetic construct
GTSGSSGSGSGGSGSGGGG

SEQ ID NO: 2179 - protein, 4 aa, synthetic construct
GSGS

SEQ ID NO: 2180 - protein, 10 aa, synthetic construct
APAPAPAPAP

SEQ ID NO: 2181 - protein, 20 aa, synthetic construct
APAPAPAPAPAPAPAPAPAP

SEQ ID NO: 2182 - protein, 32 aa, synthetic construct
AEAAAKEAAAKEAAAAKEAAAAKEAAAAKAAA

SEQ ID NO: 2183 - protein, 30 aa, synthetic construct
GGGGSGGGGSGGGGSGGGGSGGGGSGGGGS

SEQ ID NO: 2184 - protein, 35 aa, synthetic construct
GGGGSGGGGSGGGGSGGGGSGGGGSGGGGSGGGGS

SEQ ID NO: 2185 - protein, 15 aa, synthetic construct
EPKSCDKTHTCPPCP

SEQ ID NO: 2186 - protein, 24 aa, synthetic construct
GGGGSGGGSEPKSCDKTHTCPPCP

SEQ ID NO: 2187 - protein, 12 aa, Lama glama
EPKTPKPQPAAA

SEQ ID NO: 2188 - protein, 62 aa, synthetic construct
ELKTPLGDTTHTCPRCPEPKSCDTPPPCPRCPEPKSCDTPPPCPRCPEPKSCDTPPPCPRCP

SEQ ID NO: 2189 - protein, 12 aa, synthetic construct
ESKYGPPCPSCP

SEQ ID NO: 2190 - protein, 17 aa, synthetic construct
GGGGSESKYGPPCPSCP

SEQ ID NO: 2191 - protein, 17 aa, synthetic construct
PAPAPAPAPAPAPAPAP

SEQ ID NO: 2192 - protein, 22 aa, synthetic construct
GGGGSPAPAPAPAPAPAPAPAP

SEQ ID NO: 2193 - protein, 22 aa, synthetic construct
PAPAPAPAPAPAPAPAPGGGGS

SEQ ID NO: 2194 - protein, 27 aa, synthetic construct
GGGGSPAPAPAPAPAPAPAPAPGGGGS

SEQ ID NO: 2195 - protein, 11 aa, synthetic construct
  VARIANT 1..10: note = This region may encompass 1-10 residues
GGGGGGGGGGS

SEQ ID NO: 2196 - protein, 11 aa, synthetic construct
  VARIANT 2..11: note = This region may encompass 1-10 residues
SGGGGGGGGGG

SEQ ID NO: 2197 - protein, 5 aa, synthetic construct
GGGGS

SEQ ID NO: 2198 - protein, 4 aa, synthetic construct
GGGG

SEQ ID NO: 2199 - protein, 5 aa, synthetic construct
GGGGG

SEQ ID NO: 2200 - protein, 6 aa, synthetic construct
GGGGGG

SEQ ID NO: 2201 - protein, 7 aa, synthetic construct
GGGGGGG

SEQ ID NO: 2202 - protein, 8 aa, synthetic construct
GGGGGGGG

SEQ ID NO: 2203 - protein, 9 aa, synthetic construct
GGGGGGGGG

SEQ ID NO: 2204 - protein, 6 aa, synthetic construct
GGSGGS

SEQ ID NO: 2205 - protein, 9 aa, synthetic construct
GGSGGSGGS

SEQ ID NO: 2206 - protein, 12 aa, synthetic construct
GGSGGSGGSGGS

SEQ ID NO: 2207 - protein, 15 aa, synthetic construct
GGSGGSGGSGGSGGS

SEQ ID NO: 2208 - protein, 10 aa, synthetic construct
GGGGSGGGGS

SEQ ID NO: 2209 - protein, 52 aa, synthetic construct
  VARIANT 2..51: note = This region may encompass 1-10 EAAAK repeating units
AEAAAKEAAAKEAAAKEAAAKEAAAKEAAAKEAAAKEAAAKEAAAKEAAAKA

SEQ ID NO: 2210 - protein, 272 aa, Homo sapiens
MDSYLLMWGLLTFIMVPGCQAELCDDDPPEIPHATFKAMAYKEGTMLNCECKRGFRRIKSGSLYMLCTGNSSHSSWDNQCQCTSSATRNTTKQVTPQPEEQKERKTTEMQSPMQPVDQASLPGHCREPPPWENEATERIYHFVVGQMVYYQCVQGYRALHRGPAESVCKMTHGKTRWTQPQLICTGEMETSQFPGEEKPQASPEGRPESETSCLVTTTDFQIQTEMAATMETSIFTTEYQVAVAGCVFLLISVLLLSGLTWQRRQRKSRRTI

SEQ ID NO: 2211 - protein, 272 aa, Macaca fascicularis
MDPYLLMWGLLTFITVPGCQAELCDDDPPKITHATFKAVAYKEGTMLNCECKRGFRRIKSGSPYMLCTGNSSHSSWDNQCQCTSSAARNTTKQVTPQPEEQKERKTTEMQSQMQLADQVSLPGHCREPPPWENEATERIYHFVVGQTVYYQCVQGYRALHRGPAESICKMTHGKTRWTQPQLICTGETEPSQFPGEEEPQASPDGLPESETSRLVTTTDFRIQTEVAATMETFIFTTEYQVAVAGCVFLLISVLLLSGLTWQRRQRKNRRTI

SEQ ID NO: 2212 - protein, 268 aa, Mus musculus
MEPRLLMLGFLSLTIVPSCRAELCLYDPPEVPNATFKALSYKNGTILNCECKRGFRRLKELVYMRCLGNSWSSNCQCTSNSHDKSRKQVTAQLEHQKEQQTTTDMQKPTQSMHQENLTGHCREPPPWKHEDSKRIYHFVEGQSVHYECIPGYKALQRGPAISICKMKCGKTGWTQPQLTCVDEREHHRFLASEESQGSRNSSPESETSCPITTTDFPQPTETTAMTETFVLTMEYKVAVASCLFLLISILLLSGLTWQHRWRKSRRTI

SEQ ID NO: 2213 - protein, 226 aa, synthetic construct
DKTHTCPPCPAPEAAGGPSVFLFPPKPKDTLMISRTPEVTCVVVDVSHEDPEVKFNWYVDGVEVHNAKTKPREEQYNSTYRVVSVLTVLHQDWLNGKEYKCKVSNKALPAPIEKTISKAKGQPREPQVYTLPPSREEMTKNQVSLTCLVKGFYPSDIAVEWESNGQPENNYKTTPPVLDSDGSFFLYSKLTVDKSRWQQGNVFSCSVMHEALHNHYTQKSLSLSPG

SEQ ID NO: 2214 - protein, 226 aa, synthetic construct
DKTHTCPPCPAPEAAGGPSVFLFPPKPKDTLMISRTPEVTCVVVDVSHEDPEVKFNWYVDGVEVHNAKTKPREEQYNSTYRVVSVLTVLHQDWLNGKEYKCKVSNKALAAPIEKTISKAKGQPREPQVYTLPPSREEMTKNQVSLTCLVKGFYPSDIAVEWESNGQPENNYKTTPPVLDSDGSFFLYSKLTVDKSRWQQGNVFSCSVMHEALHNHYTQKSLSLSPG

SEQ ID NO: 2215 - protein, 226 aa, synthetic construct
DKTHTCPPCPAPELLGGPSVFLFPPKPKDTLMISRTPEVTCVVVAVSHEDPEVKFNWYVDGVEVHNAKTKPREEQYASTYRVVSVLTVLHQDWLNGKEYKCKVSNKALAAPIEKTISKAKGQPREPQVYTLPPSREEMTKNQVSLTCLVKGFYPSDIAVEWESNGQPENNYKTTPPVLDSDGSFFLYSKLTVDKSRWQQGNVFSCSVMHEALHNHYTQKSLSLSPG

SEQ ID NO: 2216 - protein, 226 aa, synthetic construct
DKTHTCPPCPAPEAAGAPSVFLFPPKPKDTLMISRTPEVTCVVVDVSHEDPEVKFNWYVDGVEVHNAKTKPREEQYNSTYRVVSVLTVLHQDWLNGKEYKCKVSNKALPAPIEKTISKAKGQPREPQVYTLPPSREEMTKNQVSLTCLVKGFYPSDIAVEWESNGQPENNYKTTPPVLDSDGSFFLYSKLTVDKSRWQQGNVFSCSVMHEALHNHYTQKSLSLSPG

SEQ ID NO: 2217 - protein, 229 aa, synthetic construct
ESKYGPPCPPCPAPEFEGGPSVFLFPPKPKDTLMISRTPEVTCVVVDVSQEDPEVQFNWYVDGVEVHNAKTKPREEQFNSTYRVVSVLTVLHQDWLNGKEYKCKVSNKGLPSSIEKTISKAKGQPREPQVYTLPPSQEEMTKNQVSLTCLVKGFYPSDIAVEWESNGQPENNYKTTPPVLDSDGSFFLYSRLTVDKSRWQEGNVFSCSVMHEALHNHYTQKSLSLSLGK

SEQ ID NO: 2218 - protein, 229 aa, synthetic construct
ESKYGPPCPPCPAPEFAGGPSVFLFPPKPKDTLMISRTPEVTCVVVDVSQEDPEVQFNWYVDGVEVHNAKTKPREEQFNSTYRVVSVLTVLHQDWLNGKEYKCKVSNKGLPSSIEKTISKAKGQPREPQVYTLPPSQEEMTKNQVSLTCLVKGFYPSDIAVEWESNGQPENNYKTTPPVLDSDGSFFLYSRLTVDKSRWQEGNVFSCSVMHEALHNHYTQKSLSLSLGK

SEQ ID NO: 2219 - protein, 229 aa, synthetic construct
ESKYGPPCPPCPAPEAEGGPSVFLFPPKPKDTLMISRTPEVTCVVVDVSQEDPEVQFNWYVDGVEVHNAKTKPREEQFNSTYRVVSVLTVLHQDWLNGKEYKCKVSNKGLPSSIEKTISKAKGQPREPQVYTLPPSQEEMTKNQVSLTCLVKGFYPSDIAVEWESNGQPENNYKTTPPVLDSDGSFFLYSRLTVDKSRWQEGNVFSCSVMHEALHNHYTQKSLSLSLGK

SEQ ID NO: 2220 - protein, 229 aa, synthetic construct
ESKYGPPCPPCPAPEAAGGPSVFLFPPKPKDTLMISRTPEVTCVVVDVSQEDPEVQFNWYVDGVEVHNAKTKPREEQFNSTYRVVSVLTVLHQDWLNGKEYKCKVSNKGLPSSIEKTISKAKGQPREPQVYTLPPSQEEMTKNQVSLTCLVKGFYPSDIAVEWESNGQPENNYKTTPPVLDSDGSFFLYSRLTVDKSRWQEGNVFSCSVMHEALHNHYTQKSLSLSLGK

SEQ ID NO: 2221 - protein, 229 aa, synthetic construct
ESKYGPPCPPCPAPEFEGGPSVFLFPPKPKDTLMISRTPEVTCVVVDVSQEDPEVQFNWYVDGVEVHNAKTKPREEQFNSTYRVVSVLTVLHQDWLNGKEYKCKVSNKGLGSSIEKTISKAKGQPREPQVYTLPPSQEEMTKNQVSLTCLVKGFYPSDIAVEWESNGQPENNYKTTPPVLDSDGSFFLYSRLTVDKSRWQEGNVFSCSVMHEALHNHYTQKSLSLSLGK

SEQ ID NO: 2222 - protein, 14 aa, synthetic construct
EPKSSDKTHTCPPC

SEQ ID NO: 2223 - protein, 9 aa, synthetic construct
DKTHTCPPC

SEQ ID NO: 2224 - protein, 11 aa, synthetic construct
ESKYGPPCPPC

SEQ ID NO: 2225 - protein, 5 aa, synthetic construct
VTVSS

SEQ ID NO: 2226 - protein, 5 aa, synthetic construct
VKVSS

SEQ ID NO: 2227 - protein, 5 aa, synthetic construct
VQVSS

SEQ ID NO: 2228 - protein, 5 aa, synthetic construct
VTVKS

SEQ ID NO: 2229 - protein, 5 aa, synthetic construct
VTVQS

SEQ ID NO: 2230 - protein, 5 aa, synthetic construct
VKVKS

SEQ ID NO: 2231 - protein, 5 aa, synthetic construct
VKVQS

SEQ ID NO: 2232 - protein, 5 aa, synthetic construct
VQVKS

SEQ ID NO: 2233 - protein, 5 aa, synthetic construct
VQVQS

SEQ ID NO: 2234 - protein, 6 aa, synthetic construct
VTVSSA

SEQ ID NO: 2235 - protein, 6 aa, synthetic construct
VKVSSA

SEQ ID NO: 2236 - protein, 6 aa, synthetic construct
VQVSSA

SEQ ID NO: 2237 - protein, 12 aa, synthetic construct
GQGTLVTVKPGG

SEQ ID NO: 2238 - protein, 12 aa, synthetic construct
GQGTLVTVEPGG

SEQ ID NO: 2239 - protein, 24 aa, synthetic construct
MAVMAPRTLVLLLSGALALTQTWA

SEQ ID NO: 2240 - protein, 20 aa, synthetic construct
MYRMQLLSCIALSLALVTNS

SEQ ID NO: 2241 - skipped

SEQ ID NO: 2242 - protein, 8 aa, synthetic construct
GFTLDYYA

SEQ ID NO: 2243 - protein, 8 aa, synthetic construct
ISRDGDST

SEQ ID NO: 2244 - protein, 20 aa, synthetic construct
AAYVYPDYYCSEYVLLKYDY

SEQ ID NO: 2245 - protein, 6 aa, synthetic construct
GMPLVA

SEQ ID NO: 2246 - protein, 7 aa, synthetic construct
ISSGGNT

SEQ ID NO: 2247 - protein, 13 aa, synthetic construct
NIYRSQVPPTRYS

SEQ ID NO: 2248 - protein, 8 aa, synthetic construct
ISSTDGRT

SEQ ID NO: 2249 - protein, 27 aa, synthetic construct
AAKRLGPMVHQYSLEVLTPLFLDEYDY

SEQ ID NO: 2250 - protein, 27 aa, synthetic construct
AAKRLGPMVHRYSLEVLTPLFLDEYDY

SEQ ID NO: 2251 - protein, 127 aa, synthetic construct
EVQLVESGGGLVQPGGSLRLSCAASGFTLDYYAIGWFRQAPGKEREGVSCISRDGDSTNYGDSVKGRFTISRDNAKNTVYLQMNSLEPEDTAVYYCAAYVYPDYYCSEYVLLKYDYWGQGTQVTVSS

SEQ ID NO: 2252 - protein, 117 aa, synthetic construct
EVQLVESGGGLVQAGGSLRLSCAASGMPLVAMGWYRQAPGKQRELVASISSGGNTGYAEFVKGRFTISRDNAKKMVYLQMNSVKPEDTGVYYCNIYRSQVPPTRYSWGQGTQVTVSS

SEQ ID NO: 2253 - protein, 134 aa, synthetic construct
EVQLVESGGGLVQPGGSLRLSCAASGFTLDYYAIGWFRQAPGKEREGVLSISSTDGRTYYADSVKGRFTISRDNPKNTVDLQLNSLKPEDTALYYCAAKRLGPMVHQYSLEVLTPLFLDEYDYWGQGTQVTVSS

SEQ ID NO: 2254 - protein, 134 aa, synthetic construct
EVQLVESGGGLVQPGGSLRLSCAASGFTLDYYAIGWFRQAPGKEREGVLSISSTDGRTYYADSVKGRFTISRDNPKNTVDLQLNSLKPEDTALYYCAAKRLGPMVHRYSLEVLTPLFLDEYDYWGQGTQVTVSS

SEQ ID NO: 2255 - DNA, 381 bp, synthetic construct
  source 1..381: mol_type = other DNA
gaggtgcagctggtggagtctgggggaggcttggtgcagcctggggggtctctgagactctcctgtgcagcctctggattcactttggattattacgccataggctggttccgccaggccccagggaaggagcgtgagggggtctcatgtattagtagagatggtgatagcacaaattatggagactccgtgaagggccgattcaccatctccagagacaatgccaagaacacggtgtatctgcaaatgaacagcctggaacctgaggacacagccgtttattactgtgcagcctacgtttaccctgattactactgttcagagtatgtcctgttaaaatatgactactggggccaggggacccaggtcaccgtctcctca

SEQ ID NO: 2256 - DNA, 351 bp, synthetic construct
  source 1..351: mol_type = other DNA
gaggtgcagctggtggagtctgggggaggcttggtgcaggctggggggtctctgaggctctcctgtgcagcctctggaatgcccctcgttgccatgggctggtaccgccaggctccagggaagcagcgcgagttggtcgcaagtatcagtagtggcggtaatacaggctatgcagaattcgtgaagggccgattcaccatctcgagagacaacgccaagaagatggtgtatctgcaaatgaacagtgtgaaacctgaggacacaggcgtctattattgtaatatatatcgatcgcaagtaccgcctaccagatactcttggggccaggggacccaggtcaccgtctcctca

SEQ ID NO: 2257 - DNA, 402 bp, synthetic construct
  source 1..402: mol_type = other DNA
gaggtgcagctggtggagtctgggggaggcttggtgcagcctggggggtctctgagactctcctgtgcagcctctggattcactttggattattatgccataggctggttccgccaggccccagggaaggagcgtgagggggtcttatccattagtagtacggatggcaggacatactatgcagactccgtgaagggccgattcaccatttccagagacaaccccaagaacacggtcgatctgcaattgaacagcctgaaacctgaggacacagccctttattactgtgcagcaaaacgattaggtccaatggttcatcagtattctcttgaagtccttacaccactatttctagatgagtatgactactggggccaggggacccaggtcaccgtctcctca

SEQ ID NO: 2258 - DNA, 402 bp, synthetic construct
  source 1..402: mol_type = other DNA
gaggtgcagctggtggagtctgggggaggcttggtgcagcctggggggtctctgagactctcctgtgcagcctctggattcactttggattattatgccataggctggttccgccaggccccagggaaggagcgtgagggggtcttatccattagtagtacggatggcaggacatactatgcagactccgtgaagggccgattcaccatttccagagacaaccccaagaacacggtcgatctgcaattgaacagcctgaaacctgaggacacagccctttattactgtgcagcaaaacgattaggtccaatggttcatcggtattctcttgaagtccttacaccactatttctagatgagtatgactactggggccaggggacccaggtcaccgtctcctca

SEQ ID NO: 2259 - protein, 127 aa, synthetic construct
EVQLLESGGGLVQPGGSLRLSCAASGFTLDYYAIGWFRQAPGKEREGVSCISRDGDSTNYADSVKGRFTISRDNAKNTVYLQMNSLRPEDTAVYYCAAYVYPDYYCSEYVLLKYDYWGQGTQVTVSS

SEQ ID NO: 2260 - protein, 117 aa, synthetic construct
EVQLVESGGGLVQPGGSLRLSCAASGMPLVAMGWYRQAPGKQRELVASISSGGNTGYADSVKGRFTISRDNAKKTVYLQMNSVRPEDTGVYYCNIYRSQVPPTRYSWGQGTQVTVSS

SEQ ID NO: 2261 - protein, 134 aa, synthetic construct
EVQLLESGGGLVQPGGSLRLSCAASGFTLDYYAIGWFRQAPGKEREGVLSISSTDGRTYYADSVKGRFTISRDNPKNTVYLQLNSLRPEDTAVYYCAAKRLGPMVHQYSLEVLTPLFLDEYDYWGQGTQVTVSS

SEQ ID NO: 2262 - protein, 134 aa, synthetic construct
EVQLLESGGGLVQPGGSLRLSCAASGFTLDYYAIGWFRQAPGKEREGVLSISSTDGRTYYADSVKGRFTISRDNPKNTVYLQLNSLRPEDTAVYYCAAKRLGPMVHRYSLEVLTPLFLDEYDYWGQGTQVTVSS

SEQ ID NO: 2263 - protein, 20 aa, synthetic construct
  VARIANT 12: note = D or E
  VARIANT 17: note = K or R
AAYVYPDYYCSXYVLLXYDY

SEQ ID NO: 2264 - protein, 8 aa, synthetic construct
  VARIANT 3: note = R or S
  VARIANT 4: note = D or S
  VARIANT 6: note = D or G
ISXXGXST

SEQ ID NO: 2265 - protein, 13 aa, synthetic construct
  VARIANT 5: note = P or S
  VARIANT 9: note = P, S or T
NIYRXQVPXTRYS

SEQ ID NO: 2266 - protein, 8 aa, synthetic construct
  VARIANT 2: note = I or M
  VARIANT 4: note = May be absent
  VARIANT 5: note = May be absent
  VARIANT 7: note = P, V or Y
GXPFALXA

SEQ ID NO: 2267 - protein, 27 aa, synthetic construct
  VARIANT 11: note = Q or R
AAKRLGPMVHXYSLEVLTPLFLDEYDY

SEQ ID NO: 2268 - protein, 127 aa, synthetic construct
EVQLVESGGDLVQPGGSLRLSCAASGFTLDYYAIGWFRQAPGKEREGVSCISRDGDSTNYGDSVKGRFTISRDNAKNTVYLQMNSLEPEDTAVYYCAAYVYPDYYCSEYVLLKYDYWGQGTQVTVSS

SEQ ID NO: 2269 - protein, 127 aa, synthetic construct
EVQLVESGGGLVQPGGSLRLSCAASEFTLDYYAIGWFRQAPGKEREGVSCISTSGDSTNYADSVKGRFTISRDSAKNTVYLQMNSLKPEDTAVYYCAAYVYPDYYCSEYVLLRYDYWGQGTQVTVSS

SEQ ID NO: 2270 - protein, 127 aa, synthetic construct
EVQLVESGGGLVHPGGSLRLSCAASEFTLDYYAIGWFRQAPGKDREGVSCISRDGDSTNYADSVKGRFTISRDNAKNTVYLQMNSLKPEDTAVYYCAAYVYPDYYCSEYVLLKYDYWGQGTQVTVSS

SEQ ID NO: 2271 - protein, 127 aa, synthetic construct
EVQLVESGGGLVQPGGSLRLSCAASGFTLDYYAIGWFRQAPGKEREGVSCISRDGDSTNYGDSVKGRFTISRDNAKNTVYLQMNSLEPEDTAVYYCAAYVYPDYYCSEYVPLKYDYWGQGTQVTVSS

SEQ ID NO: 2272 - protein, 127 aa, synthetic construct
EVQLVESGGGLVQPGGSLRLSCAASGFTLEYYAIGWFRQAPGKEREGVSCISSSGDSTNYADSVKGRFTISRDNAKNTVYLQMNSLKPEDTAVYYCAAYVYPDYYCSEYVLLKYDYWGQGTQVTVSS

SEQ ID NO: 2273 - protein, 127 aa, synthetic construct
EVQLVESGGGLVQPGGSLRLSCAASGFTLDYYGIGWFRQAPGKEREGVSCISSSGDSTNYADSVKGRFTISRDNAKNTVYLQMNSLKPEDTGVYYCAAYVYPDYYCSEYVLLRYDYWGQGTQVTVSS

SEQ ID NO: 2274 - protein, 127 aa, synthetic construct
EVQLVESGGGLVQPGGSLRLSCAASGFTLDYYAIGWFRQVPGKEREGVSCISSSGDSTNYGTSVKGRFTISRDNAKNTVSLQMNSLKPEDTAVYYCAAYVYPDYYCSEYILSKYDYWGQGTQVTVSS

SEQ ID NO: 2275 - protein, 127 aa, synthetic construct
EVQLVESGGGLVQPGGSLRLSCAASEFTLDYYAIGWFRQAPGKEREGVSCISRDADNTNYADSVKGRFTISRDNAKNTVYLQMNSLKPEDTAVYYCAAYVYPDYYCSDYVLLKYDYWGQGTQVTVSS

SEQ ID NO: 2276 - protein, 127 aa, synthetic construct
EVQLVESGGGLVQPGGSLRLSCAASESTLDYYAIGWFRQAPGKEREGVSCISVSGDSTNYANSVKGRFTISRDNAKNTVYLQMNSLKPEDTAVYYCAAYVYPDYYCSEYVLLKYDYWGQGTQVTVSS

SEQ ID NO: 2277 - protein, 127 aa, synthetic construct
EVQLVESGGGLVQPGGSLRLSCAASGFTLDYYAIGWFRQAPGKEREGVSCISRDGDSTNYGDSVKGRFTTSRDNAKNTVYLQMNSLEPEDTAVYYCAAYVYPDYYCSEYVLLKYDYWGQGTQVTVSS

SEQ ID NO: 2278 - protein, 127 aa, synthetic construct
EVQLVESGGGLVQPGGSLRLSCAASEFTLDYYAVGWFRQAPGKEREGVSCISSSGDATDYADSVKGRFTISRDNAKNTVYLQMNSLKFEDTAVYYCAAYVYPDYYCSEYVLLKYDYWGQGTQVTVSS

SEQ ID NO: 2279 - protein, 127 aa, synthetic construct
EVQLVESGGGLVQPGGSLRLSCAAPGFTLDYYAIGWFRQAPGKEREGVSCISSSGDSTNYADSVKGRFTISRDNAKNTVYLQMNSLKPEDTAVYYCAAYVYPDYYCSEYVLLKYDYWGQGTQVTVSS

SEQ ID NO: 2280 - protein, 127 aa, synthetic construct
EVQLVESGGGLVQPGGSLRLSCAASGFTLDYYAIGWFRQAPGKEREGVSCISRDGDSTNYGDSVKGRFTISRDNAKNTVYLQMNNLEPEDTAVYYCAAYVYPDYYCSEYVLLKYDYWGQGTQVTVSS

SEQ ID NO: 2281 - protein, 127 aa, synthetic construct
EVQLVESGGGLVQPGGSLRLSCAASGFTLDYYAIGWFRQAPGKEREGVSCISRDGDSTNYGDSVKGRFTISRDNAKNTVYLQMNSLEPEDTAVYYCAAYVYPDYYCSEYVLLKYDYWSQGTQVTVSS

SEQ ID NO: 2282 - protein, 127 aa, synthetic construct
EVQLVESGGGLVQPGGSLRLSCAASGFTLDYYSIGWFRQAPGKEREGVSCISSSGDSTNYRDSVKGRFTISRDNAKNTVYLQMNSLKPEDTAVYYCAAYVYPDYYCSEYVKLKYDYWGQGTQVTVSS

SEQ ID NO: 2283 - protein, 127 aa, synthetic construct
EVQLVESGGGLVQPGGSLRLSCAASEFTLDYYAIGWFRQTPGKEREGVSCISTSGDSTNYAESVKGRFTISRDNAKNTVYLQMNSLKPEDTAVYYCAAYVYPDYYCSDYVLLKYDYWGQGTQVTVSS

SEQ ID NO: 2284 - protein, 127 aa, synthetic construct
EVQLVESGGGLVQPGGSLRLSCTGSDVTLDYYAIGWFRQAPGKEREGVSCISSSGDSTNYADSVKGRFTISRDSAKNTVYLQMNSLKPEDTAVYYCAAYVYPDYYCSEYVLLKYDYWGQGTQVTVSS

SEQ ID NO: 2285 - protein, 127 aa, synthetic construct
EVQLVESGGGLVQPGGSLRLSCAASGFTLDYYAIGWFRQAPGKEREGVSCISSSGDSTNYADSVKGRFTISRDNAKNTVTLQMNSLKPEDTAVYYCAAYVYPDYYCSEYVLLKYDYWGQGTQVTVSS

SEQ ID NO: 2286 - protein, 127 aa, synthetic construct
EVQLVESGGGLVQPGGSLRLSCAASGFTLDYYSIGWFRQAPGKEREGVSCISSSGDSTNYADSVKGRFTISRDSAKNTVYLQMNSLKPEDTAVYYCAAYVYPDYYCSEYVLLKYDYWGQGTQVTVSS

SEQ ID NO: 2287 - protein, 127 aa, synthetic construct
EVQLVESGGGLVQPGGSLRLSCAASGFPLGYYSIGWFRQAPGKEREGVSCISSSGDSTNYADSVKGRFTISRDNAKNTVYLQMNSLKPEDTAVYYCAAYVYPDYYCSEYVLLKYDYWGQGTQVTVSS

SEQ ID NO: 2288 - protein, 127 aa, synthetic construct
EVQLVESGGGLVQPGGSLRLSCAASGFTLGYYSIGWFRQAPGKEREGVSCISSSGDSTNYADSVKGRFTISRDNAKNTVYLQMNSLKPEDTAVYYCAAYVYPDYYCSEYVKLKYDYWGQGTQVTVSS

SEQ ID NO: 2289 - protein, 127 aa, synthetic construct
EVQLVESGGGLVQPGGSLRLSCAASGFTLDYYAIGWFRQAPGKEREGVSCISRDGDSTNYGDSVKGRFTISRDNAKNTVYLQMNSLESEDTAVYYCAAYVYPDYYCSEYVLLKYDYWGQGTQVTVSS

SEQ ID NO: 2290 - protein, 127 aa, synthetic construct
EVQLVESGGGLVQPGGSLRLSCAASGFTLDYYAIGWFRQAPGKEREGVSCISSSGDSTNYADSVKGRFTISRDNAKNTVYLQMNSLKPEDTAVYYCAAYVYPDYYCSEYVLLKYDYWGQGTQVTVSS

SEQ ID NO: 2291 - protein, 127 aa, synthetic construct
EVQLVESGGGLVQPGGSLRLSCAASEFTLDYYAIGWFRQAPGKEREGISCISSSGDVTHYADSVKGRFTISRDNAKNTVYLQMNSLAPEDTAVYYCAAYVYPDYYCSEYVLLKYDYWGQGTQVTVSS

SEQ ID NO: 2292 - protein, 127 aa, synthetic construct
EVQLVESGGGLVQPGGSLRLSCAASGFTLDYYAIGWFRQVPGKEREGVSCISSSGDSTNYANSVKGRFTISRDNAKNTVSLQMNSLKPEDTAVYYCAAYVYPDYYCSEYILLKYDYWGQGTQVTVSS

SEQ ID NO: 2293 - protein, 127 aa, synthetic construct
EVQLVESGGGLVQPGGSLRLSCAASGFALDYYAIGWFRQAPGKEREGVSCISSSGDSTNYADSVKGRFTISRDSAKNTVYLQMNSLKPEDTAVYYCAAYVYPDYYCSEYVLLKYDYWGQGTQVTVSS

SEQ ID NO: 2294 - protein, 127 aa, synthetic construct
EVQLVESGGGLVQPGGSLRLSCAASGFTLDYYAIGWFRQAPGKEREGVSCISSSGGSTNYADSVKGRFTISRDNAKNTVYLQMNSLKPEDTAVYYCAAYVYPDYYCSEYVKLKYDYWGQGTQVTVSS

SEQ ID NO: 2295 - protein, 127 aa, synthetic construct
EVQLVESGGGLVQPGGSLRLSCAASGFTLDYYSIGWFRQAPGKEREGVSCISSSGDSTNYADSVKGRFTISRDNAKNTVYLQMNSLKPEDTAVYYCAAYVYPDYYCSEYVKLKYDYWGQGTQVTVSS

SEQ ID NO: 2296 - protein, 127 aa, synthetic construct
EVQLVESGGGLVQPGGSLRLSCAASGFTLDYYAIGWFRQAPGKEREGVSCISSSGDSTNYADSVKGRFTISRDNAKNTVYLQMNSLKPEDTAVYYCAAYVYPDYYCSEYVKLKYDYWGQGTQVTVSS

SEQ ID NO: 2297 - protein, 127 aa, synthetic construct
EVQLVESGGGLVQPGGSLRLSCAASGFTLDYYAIGWFRQAPGKEREGVSCISSSGDSTNYADSVKGRFTISRDNAKNTVYLQMNSLKPEDTAVYYCAAYVYPDYYCSDYVLLKYDYWGQGTQVTVSS

SEQ ID NO: 2298 - protein, 127 aa, synthetic construct
EVQLVESGGGLVQPGGSLRLSCAASGFTLDYYAIGWFRQAPGKEREGVSCISSSGGSTNYADSVKGRFTISRDNAKNTVYLQMNSLKPEDTAVYYCAAYVYPDYYCSDYVLLKYDYWGQGTQVTVSS

SEQ ID NO: 2299 - protein, 127 aa, synthetic construct
EVQLVESGGGLVQPGGSLRLSCAASGFTLDYYAIGWFRQAPGKEREGVSCISSSGGSTNYADSVKGRFTISRDNAKNTVYLQMNSLKPEDTAVYYCAAYVYPDYYCSDYDLLRYDYWGQGTQVTVSS

SEQ ID NO: 2300 - protein, 127 aa, synthetic construct
EVQLVESGGGLVQPGGSLRLSCAASGFTLDYYAIGWFRQAPGKEREGVSCISSSGGNTNYADSVKGRFTISRDNAKNTVYLQMNSLKPEDTAVYYCAAYVYPDYYCSDYVLLKYDYWGQGTQVTVSS

SEQ ID NO: 2301 - protein, 127 aa, synthetic construct
EVQLVESGGGLVQPGGSLRLSCAASGFTLDYYAIGWFRQAPGKEREGVSCISSSGGSTNYADSVKGRSTISRDNAKNTVYLQMNSLKPEDTAVYYCAAYVYPDYYCSDYDLLRYDYWGQGTQVTVSS

SEQ ID NO: 2302 - protein, 127 aa, synthetic construct
EVQLVESGGGLVQPGGSLRLSCAASGFTLDYYAIGWFRQAPGKEREGVSCISSSGDSTNYADSVKGRFTISRDNAKNTVYLQMNSLKPEDTAVYYCAAYVYPDYYCSGYVLLEYDYWGQGTQVTVSS

SEQ ID NO: 2303 - protein, 127 aa, synthetic construct
EVQLVESGGGLVQPGGSLRLSCAASGFTLDYYGIGWFRQAPGKEREGVSCISSSGDSTNYADSVKGRFTISRDNAKNTVYLQMNSLKPEDTAVYYCAAYVYPDYYCSGYVLLEYDYWGQGTQVTVSS

SEQ ID NO: 2304 - protein, 127 aa, synthetic construct
EVQLVESGGGLVQPGGSLRLSCAASGFTLDYYAIGWFRQAPGKEREGVACISSSGDSTNYADSVKGRFTISRDNAKNTVYLQMNSLKPEDTAIYYCAAYVYPDYYCSEYVLSKYDYWGQGTQVTVSS

SEQ ID NO: 2305 - protein, 127 aa, synthetic construct
EVQLVESGGGLAQPGGSLRLSCAASGFTLDYYSIGWFRQAPGKEREGVSCISSSGDSTNYADSVKGRFTISRDNAKNTVYLQMNSLKPEDTAVYYCAAYVYPDYYCSGYVLLEYDYWGQGTQVTVSS

SEQ ID NO: 2306 - protein, 127 aa, synthetic construct
EVQLVESGGGLVQPGGSLRLSCAASGFTLDYYAIGWFRQAPGKEREGVSCISSSGGSTNYADSVKGRFTISRDNAKNTVYLQMNSLKPEDTAVYYCAAYVYPDYYCSDYVLSRYDYWGQGTQVTVSS

SEQ ID NO: 2307 - protein, 127 aa, synthetic construct
EVQLVESGGGLVQPGGSLRLSCAASGFTLDYYAIGWFRQAPGKEREGVSCISSSGGSTNYADSVKGRFTISRDNAKNTVYLQMNSLKPEDTAVYYCAAYVYPDYYCSEYVLLRYDYWGQGTQVTVSS

SEQ ID NO: 2308 - protein, 127 aa, synthetic construct
EVQLVESGGGLVQPGGSLRLSCAASGFTLDYYAIGWFRQAPGKEREGVSCISSSGGSTNYADSVKGRFTISRDNAKNTVYLQMNSLKPEDTAVYYCAAYVYPDYYCSDYVLLRYDYWGQGTQVTVSS

SEQ ID NO: 2309 - protein, 127 aa, synthetic construct
EVQLVESGGGLVQPGGSLRLSCAASGFTLDYYAIGWFRQAPGKEREGVSCISTSGDSTNYADSVKGRFTISRDNAKNTVYLQMNSLKPEDTAVYYCAAYVYPDYYCSDYVLSRYDYWGQGTQVTVSS

SEQ ID NO: 2310 - protein, 127 aa, synthetic construct
EVQLVESGGGLVQPGGSLRLSCAASGFTLDYYAIGWFRQAPGKEREGVSCISRDGGSTNYGDSVKGRFTISRDNAKNTVYLQMNSLEPEDTAVYYCAAYVYPDYYCSEYVLLRYDYWGQGTQVTVSS

SEQ ID NO: 2311 - protein, 127 aa, synthetic construct
EVQLVESGGGLVQPGGSLRLSCAASGFTLDYYAIGWFRQAPGKEREGVSCISSSGGSTNYADSVKGRFTISRDTAKNTVYLQMNSLKPEDTAVYYCAAYVYPDYYCSDYDLLRYDYWGQGTQVTVSS

SEQ ID NO: 2312 - protein, 127 aa, synthetic construct
EVQLVESGGGLVQPGGSLRLSCAASGFTLDYYAIGWFRQAPGKEREGVSCISSSGGSTNYADSVKGRFTISRDNAKNTVYLQMNSLKPEDTAVYYCAAYVYPDYYCSDYVPLRYDYWGQGTQVTVSS

SEQ ID NO: 2313 - protein, 127 aa, synthetic construct
EVQLVESGGGLVQPGGSLRLSCAASGFTLDYYAIGWFRQAPGKEREGVSCISTSGDSTNYADSVKGRFTISRDNAKNTVYLQMNSLKPEDTAVYYCAAYVYPDYYCSDYVPLRYDYWGQGTQVTVSS

SEQ ID NO: 2314 - protein, 127 aa, synthetic construct
EVQLVESGGGLVQPGGSLRLSCAASGFTLDYYAIGWFRQAPGKEREGVSCISSSGGSTNYADSVKGRFTISRDNAKNTVYLQMNSLKPEDTAVYYCAAYVYPEYYCSEYVPLRYDYWGQGTQVTVSS

SEQ ID NO: 2315 - protein, 127 aa, synthetic construct
EVQLVESGGGLVQPGGSLRLSCAASGFTLDYYAIGWFRQAPGKEREGVSCISSSGDSTNYADSVKGRFTISRDNAKNTVTLQMSSLKPEDTAVYYCAAYVYPDYYCSEYALLKYDYWGQGTQVTVSS

SEQ ID NO: 2316 - protein, 127 aa, synthetic construct
EVQLVESGGGLVQPGGSLRLSCAASGFTLDYYAIGWFRQAPGKEREGVSCISSSGGSTNYADSVKGRFTISRDNAKNTVYLQMNSLKPEDTAVYYCAAYVDPDYYCSEYVLLKYDYWGQGTQVTVSS

SEQ ID NO: 2317 - protein, 127 aa, synthetic construct
EVQLVESGGGLVQPGGSLRLSCAASGFTLDYYAIGWFRQAPGKEREGVSCISSSGGSTNYADSVKGRFTISRDNAKNTVYLQMNSLKPEDTAVYYCAAYDYPDYYCSEYVLLKYDYWGQGTQVTVSS

SEQ ID NO: 2318 - protein, 127 aa, synthetic construct
EVQLVESGGGLVQPGGSLRLSCAASGFTLDYYAIGWFRQAPGKEREGVSCISSSGGSTNYADSVKGRFTISRDNAKNTVYLQMNSLKPEDTAVYYCAAYVYPDDYCSEYVLLKYDYWGQGTQVTVSS

SEQ ID NO: 2319 - protein, 127 aa, synthetic construct
EVQLVESGGGLVQPGGSLRLSCAASGFTLDYYAIGWFRQAPGKEREGVSCISSSGGSTNYADSVKGRFTISRDNAKNTVYLQMNSLKPEDTAVYYCAAYVYPDYDCSEYVLLKYDYWGQGTQVTVSS

SEQ ID NO: 2320 - protein, 127 aa, synthetic construct
EVQLVESGGGLVQPGGSLRLSCAASGFTLDYYAIGWFRQAPGKEREGVSCISSSGGSTNYADSVKGRFTISRDNAKNTVYLQMNSLKPEDTAVYYCAAYVYPDYYCSEYALLKYDYWGQGTQVTVSS

SEQ ID NO: 2321 - protein, 127 aa, synthetic construct
EVQLVESGGGLVQPGGSLRLSCAASGFTLDYYAIGWFRQAPGKEREGVSCISSSGDSTNYADSVKGRFTISRDNAKNTVYLQMNSLKPEDTAVYYCAAYVYPDYYCSDYVLSRYDYWGQGTQVTVSS

SEQ ID NO: 2322 - protein, 127 aa, synthetic construct
EVQLVESGGGLVQPGGSLRLSCVASGFTLDYYAIGWFRQAPGKEREGVSCISSSGDSTNYADSVKGRFTISRDNAKNTVYLQMNSLKPEDTAVYYCAAYVYPDYYCSEYALLKYDYWGQGTQVTVSS

SEQ ID NO: 2323 - protein, 127 aa, synthetic construct
EVQLVESGGGLVQPGGSLRLSCAASGFTLDYYAIGWFRQAPGKEREGVSCISSSGGSTNYADSVKGRFTISRDNAKNTVYLQMNSLKPEDTAVYYCAAYVYPDYYCSEYALFRYDYWGQGTQVTVSS

SEQ ID NO: 2324 - protein, 127 aa, synthetic construct
EVQLVESGGGLVQPGGSLRLSCAASGFTLDYYAIGWFRQAPGKEREGVSCISSSGGSTNYAGSVKGRFTISRDNAKNTVYLQMNSLKPEDTAVYYCAAYVYPDYFCSEYDLLRYDYWGQGTQVTVSS

SEQ ID NO: 2325 - protein, 127 aa, synthetic construct
EVQLVESGGGLVQPGGSLRLSCAASGFTLDYYAIGWFRQAPGKEREGVSCISSSGGSTNYADSVKGRFTISRDNAKNTVYLQMNSLKPEDTAVYYCAAYVYPDHYCSEYVLLKYDYWGQGTQVTVSS

SEQ ID NO: 2326 - protein, 127 aa, synthetic construct
EVQLVESGGGLVQPGGSLRLSCAASGFTLDYYAIGWFRQAPGKEREGVSCISSSGGSTNYADSVKGRFTISRDNAKNTVYLQMNSLKPEDTAVYYCAAYVYPEYYCSEYVLLKYDYWGQGTQVTVSS

SEQ ID NO: 2327 - protein, 127 aa, synthetic construct
EVQLVESGGGLVQPGGSLRLSCAASGFTLDYYAIGWFRQAPGKEREGVSCISSSGGSTNYADSVKGRFTISRDNAKNTVYLQMSSLKPEDTAVYYCAAYVYPDYYCSEYALSRYDYWGQGTQVTVSS

SEQ ID NO: 2328 - protein, 131 aa, synthetic construct
EVQLVESGGGLVQPGGSLRLSCAASGFTLDYYAIGWFRQAPGKEREGVSCIRTEISSTGDTTNYADSVKGRFTISRDNAKNTVYLQMNSLKPEDTAVYYCAAYVYPDYYCSEYVLSRYDHWGQGTQVTVSS

SEQ ID NO: 2329 - protein, 127 aa, synthetic construct
EVQLVESGGGLVQPGGSLRLSCAASGFTLDYYAIGWFRQAPGKEREGVSCISSSGGSTNYADSVKGRFTISRDNAKNTVYLQMNSLKPEDTAVYYCAAYVYPDDYCSEYVPLRYDYWGQGTQVTVSS

SEQ ID NO: 2330 - protein, 127 aa, synthetic construct
EVQLVESGGGLVQPGGSLRLSCAASGFTLDYYAIGWFRQAPGKEREGVSCISSSGGSTNYADSVKGRFTISRDNAKNTVYLQMNSLKPEDTAVYYCAASVYPDYYCSEYVLLKYDYWGQGTQVTVSS

SEQ ID NO: 2331 - protein, 127 aa, synthetic construct
EVQLVESGGGLVQPGGSLRLSCAASGFTLDYYAIGWFRQAPGKEREGVSCISSSGGSTNYADSVKGRFTISRDNAKNTVYLQMNSLKPEDTAVYYCAAYVYPDYYCSEYVLSKYDYWGQGTQVTVSS

SEQ ID NO: 2332 - protein, 127 aa, synthetic construct
EVQLVESGGGLVQPGGSLRLSCAASGFIMDYYAIGWFRQAPGKEREGVSCISSSGDSTNYADSVKGRFTISRDNAKNTVYLQMNSLKPEDTAVYYCAAYVYPDHYCSEYVLLKYDYWGQGTQVTVSS

SEQ ID NO: 2333 - protein, 127 aa, synthetic construct
EVQLVESGGGLVQPGGSLRLSCAASGFTLDYYAIGWFRQAPGKEREGVSCISSSGDSTNYADSVKGRFTISRDNAKNTVYLQMNSLKPEDTAVYYCAAYVYPDYYCSEYVLSKYDYWGQGTQVTVSS

SEQ ID NO: 2334 - protein, 127 aa, synthetic construct
EVQLVESGGGLVQPGGSLRLSCAASGFTLDYYAIGWFRQAPGKEREGVSCISSSGGSTNYADSVKGRFTISRDNARNTVYLQMNSLKPEDTAVYYCAAYVYPDYYCPEYVLSRYDYWGQGTQVTVSS

SEQ ID NO: 2335 - protein, 127 aa, synthetic construct
EVQLVESGGGLAQPGGSLRLSCAASGFTLDYYAIGWFRQAPGKEREGVSCISSSGGSTNYADSVKGRFTISRDNAKNTVYLQMNSLKPEDTAVYYCAAYVYPDYYCSDYDLLRYDYWGQGTQVTVSS

SEQ ID NO: 2336 - protein, 127 aa, synthetic construct
EVQLVESGGGLVQPGGSLRLSCAASGFTLDYYAIGWFRQAPGKEREGVSCISSSGGSTNYADSVKGRFTISRDNAKNTVYLQMNSLKPEDTAVYYCAAYAYPDYYCSEYVLLKYDYWGQGTQVTVSS

SEQ ID NO: 2337 - protein, 127 aa, synthetic construct
EVQLVESGGGLVQPGGSLRLSCAASGFTLDYYAIGWFRQAPGKEREGVSCISSSGGSTNYADSVKGRFTISRDNAKNTVYLQMNSLKPEDTAVYYCAAYVSPDYYCSEYVLLKYDYWGQGTQVTVSS

SEQ ID NO: 2338 - protein, 127 aa, synthetic construct
EVQLVESGGGLVQPGGSLRLSCAASGFTLDYYAIGWFRQAPGKEREGVSCISSSGGNTNYADSVKGRFTISRDNAKNTVYLQMNSLKPEDTAVYYCAAYAYPDYYCSDYVLFKYDYWGQGTQVTVSS

SEQ ID NO: 2339 - protein, 127 aa, synthetic construct
EVQLVESGGGLVQPGGSLRLSCAASGFTLDYYAIGWFRQAPGKEREGVSCISSSGGSTNYADSVKGRFTISRDNAKNTVYLQMNSLKPEDTAVYYCAAYVYPDYYCSEYIPLRYDYWGQGTQVTVSS

SEQ ID NO: 2340 - protein, 127 aa, synthetic construct
EVQLVESGGGLVQPGGSLRLSCAASGFTLDYYAIGWFRQAPGKEREGVSCISSSGGSTNYADSVKGRFTISRDNAKNTVYLQMNSLKPEDTAVYYCAAYVYPDYYCSEYVLIKYDYWGQGTQVTVSS

SEQ ID NO: 2341 - protein, 127 aa, synthetic construct
EVQLVESGGGLVQPGGSLRLSCAASGFTLDYYAIGWFRQAPGKEREGVSCISSSGGSTNYADSVKGRFTISRDNAKNTVYLQMNSLKPEDTAVYYCAAYVYPYYYCSEYVLLKYDYWGQGTQVTVSS

SEQ ID NO: 2342 - protein, 127 aa, synthetic construct
EVQLVESGGGLVQPGGSLRLSCAASGFTLDYYAIGWFRQAPGKEREGVSCISSSGGSTNYADSVKGRFTISRDNAKNTVYLQMNSLKPEDTAVYYCAASVYPDYYCSDYVLLRYDYWGQGTQVTVSS

SEQ ID NO: 2343 - protein, 127 aa, synthetic construct
EVQLVESGGGLVQPGGSLRLSCAASGFIMDYYAIGWFRQAPGKEREGVSCISSSGDSTNYADSVKGRFTISRDNAKNTVYLQMNSLKPEDTAVYYCAAYVYPDYYCSEYVLLKYDHWGQGTQVTVSS

SEQ ID NO: 2344 - protein, 127 aa, synthetic construct
EVQLVESGGGLVQPGGSLRLSCAASGFTLDYYAIGWFRQAPGKEREGVSCISSSGGSTNYADSVKGRFTISRDNAKNTVYLQMNSLKPEDTAVYYCAAYVYPDYYCTEYVLLKYDYWGQGTQVTVSS

SEQ ID NO: 2345 - protein, 127 aa, synthetic construct
EVQLVESGGGLVQPGGSLRLSCAASGFTLDYYAIGWFRQAPGKEREGVSCISSSGDSTNYADSVKGRFTISRDNAKNTVYLQMNSLKPEDTAVYYCAAYVYSDYYCSDYVLLRYDYWGQGTQVTVSS

SEQ ID NO: 2346 - protein, 127 aa, synthetic construct
EVQLVESGGGLVQPGGSLRLSCAASGFTLDYYAIGWFRQAPGKEREGVSCISSSGGSTNYADSVKGRFTISRDNAKNTVYLQMNSLKPEDTAVYYCAAYVYPEYYCSEYVLSRYDYWGQGTQVTVSS

SEQ ID NO: 2347 - protein, 127 aa, synthetic construct
EVQLVESGGGLVQPGGSLRLSCAASGFTLDYYAIGWFRQAPGKEREGVSCISRDGGSTNYGDSVKGRFTISRDNAKNTVYLQMNSLEPEDTAVYYCAAYVYPDYYCTEYVQLRYDYWGQGTQVTVSS

SEQ ID NO: 2348 - protein, 127 aa, synthetic construct
EVQLVESGGGLVQPGGSLRLSCAASGFTLDYYAIGWFRQAPGKEREGVSCISTSGDSTNYADSVKGRFTISRDNAKNTVYLQMNSLKPEDTAVYYCAAYVYPDYYCSDYVQLRYDYWGQGTQVTVSS

SEQ ID NO: 2349 - protein, 127 aa, synthetic construct
EVQLVESGGGLVQPGGSLRLSCAASGFTLDYYAIGWFRQAPGKEREGVSCISSSGGSTNYADSVKGRFTISRDNAKNTVYLQMNSLKPEDTAVYYCAAYVDPDYYCSEYVPLRYDYWGQGTQVTVSS

SEQ ID NO: 2350 - protein, 127 aa, synthetic construct
EVQLVESGGGLVQPGGSLRLSCAASGFTLDYYAIGWFRQAPGKEREGVSCISSSGGSTNYADSVKGRFTISRDNAKNTVYLQMNSLKPEDTAVYYCAAYVYTDYYCSDYVLLRYDYWGQGTQVTVSS

SEQ ID NO: 2351 - protein, 127 aa, synthetic construct
EVQLVESGGGLVQPGGSLRLSCAASGFTLDYYAIGWFRQAPGKEREGVSCISSSGGSTNYADSVKGRFTISRDNAKNTVYLQMNSLKPEDTAVYYCAAYVYPDYYCSEYVLLKYAYWGQGTQVTVSS

SEQ ID NO: 2352 - protein, 127 aa, synthetic construct
EVQLVESGGGLVQPGGSLRLSCAASGFTLDYYAIGWFRQAPGKEREGVSCISSSGGSTNYADSVKGRFTISRDNAKNTVYLQMNSLKPEDTAVYYCAAYVYPDYYCSEYVLLKYDHWGQGTQVTVSS

SEQ ID NO: 2353 - protein, 127 aa, synthetic construct
EVQLVESGGGLVQPGGSLRLSCAASGFTLDYYAIGWFRQAPGKEREGVSCISSSGGSTNYADSVKGRFTISRDNAKNTVYLQMNSLKPEDTAVYYCAAYVYSDYYCSEYVLSRYDYWGQGTQVTVSS

SEQ ID NO: 2354 - protein, 127 aa, synthetic construct
EVQLVESGGGLVQPGGSLRLSCAASGFTLDYYAIGWFRQAPGKEREGVSCISSSGGNTNYADSVKGRFTISRDNAKNTVYLQMNSLKPEDTAVYYCATYVYPDYYCSDYVLSKYDYWGQGTQVTVSS

SEQ ID NO: 2355 - protein, 127 aa, synthetic construct
EVQLVESGGGLVQPGGSLRLSCAASGFTLDYYAIGWFRQAPGKEREGVSCISSSGGSTNYADSVKGRFTISRDNAKNTVYLQMNSLKPEDTAVYYCAAYVYPEYYCSDYVLLRYDYWGQGTQVTVSS

SEQ ID NO: 2356 - protein, 127 aa, synthetic construct
EVQLVESGGGLVQPGGSLRLSCAASGFTLDYYAIGWFRQAPGKEREGVSCISSSGDSTNYADSVKGRFTISRDNAKNTVYLQMNSLKPEDTAVYYCAVYVYPDYYCSEYVLLKYDYWGQGTQVTVSS

SEQ ID NO: 2357 - protein, 127 aa, synthetic construct
EVQLVESGGGLVQPGGSLRLSCAASGFIMDYYAIGWFRQAPGKEREGVSCISSSGDSTNYADSVKGRFTISRDNAKNTVYLQMNSLKPEDTAVYYCAAYVYPEYYCSEYVLLKYDYWGQGTQVTVSS

SEQ ID NO: 2358 - protein, 131 aa, synthetic construct
EVQLVESGGGLVQPGGSLRLSCAASGFTLDYYAIGWFRQAPGKEREGVSCIRTEISSTGDTTNYADSVKGRFTISRDNAKNTVYLQMNSLKPEDTAVYYCAAYVYPEYYCSEYVLSRYDYWGQGTQVTVSS

SEQ ID NO: 2359 - protein, 127 aa, synthetic construct
EVQLVESGGGLVQPGGSLRLSCAASGFTLDYYAIGWFRQAPGKEREGVSCISSSGDSTNYADSVKGRFTISRDNAKNTVYLQMNSLKPEDTAVYYCAAYVYPEYYCSEYVLLKYDYWGQGTQVTVSS

SEQ ID NO: 2360 - protein, 127 aa, synthetic construct
EVQLVESGGGLVQPGGSLRLSCAASGFTLDYYAIGWFRQAPGKEREGVSCISSSGDSTNYADSVKGRFTISRDNAKNTVYLQMNSLKPEDTAVYYCAAYVDPDYYCSEYVLLKYDYWGQGTQVTVSS

SEQ ID NO: 2361 - protein, 127 aa, synthetic construct
EVQLVESGGGLVQPGGSLRLSCAASGFTLDYYAIGWFRQAPGKEREGVSCISSSGGSTNYADSVKGRFTISRDNAKNTVYLQMSSLKPEDTAVYYCAAYVYPDYYCSDYDLSRYDHWGQGTQVTVSS

SEQ ID NO: 2362 - protein, 127 aa, synthetic construct
EVQLVESGGGLVQPGGSLRLSCAASGFTLDYYAIGWFRQAPGKEREGVSCISRDGGSTNYGDSVKGRFTISRDNAKNTVYLQMNSLEPEDTAVYYCAAYVYPDNYCSEYILLRYDYWGQGTQVTVSS

SEQ ID NO: 2363 - protein, 127 aa, synthetic construct
EVQLVESGGGLVQPGGSLRLSCAASGFTLDYYAIGWFRQAPGKEREGVSCISSSGGSTNYADSVKGRFTISRDNAKNTVYLQMNSLKPEDTAVYYCAAYVYPDFYCSEYVPLRYDYWGQGTQVTVSS

SEQ ID NO: 2364 - protein, 127 aa, synthetic construct
EVQLVESGGGLVQPGGSLRLSCAASGFTLDYYAIGWFRQAPGKEREGVSCISSSGGSTNYADSVKGRFTISRDNAKNTVYLQMNSLKPEDTAVYYCAAYVYPDDYCSEYVLSRYDYWGQGTQVTVSS

SEQ ID NO: 2365 - protein, 127 aa, synthetic construct
EVQLVESGGGLVQPGGSLRLSCAASGFTLDYYAIGWFRQAPGKEREGVSCISTSGDSTNYADSVKGRFTISRDNAKNTVYLQMNSLKPEDTAVYYCAAYVYPDYYCSDYVLLRHDYWGQGTQVTVSS

SEQ ID NO: 2366 - protein, 127 aa, synthetic construct
EVQLVESGGGLVQPGGSLRLSCAASGFTLDYYAIGWFRQAPGKEREGVSCISSSGGSTNYADSVKGRFTISRDNAKNTVYLQMNSLKPEDTAVYYCAAYVYPDYYCSDYVLLRHDYWGQGTQVTVSS

SEQ ID NO: 2367 - protein, 127 aa, synthetic construct
EVQLVESGGGLVQPGGSLRLSCAASGFTLDYYAIGWFRQAPGKEREGVSCISSSGGSTNYADSVKGRFTISRDNAKNTVYLQMNSLKPEDTAVYYCAAFVYPDYYCSDYVLLRYDYWGQGTQVTVSS

SEQ ID NO: 2368 - protein, 127 aa, synthetic construct
EVQLVESGGGLVQPGGSLRLSCAASGFTLDYYAIGWFRQAPGKEREGVSCISSSGGSTNYADSVKGRFTISRDNAKNTVYLQMNSLKPEDTAVYYCAAYVYPDDSCSEYVLLRYDYWGQGTQVTVSS

SEQ ID NO: 2369 - protein, 127 aa, synthetic construct
EVQLVESGGGLVQPGGSLRLSCAASGFTLDYYAIGWFRQAPGKEREGVSCISSSGDSTNYADSVKGRFTISRDNAKNTVYLQMNSLKPEDTAVYYCAAYVYPDYYCSDYVLLRHDYWGQGTQVTVSS

SEQ ID NO: 2370 - protein, 127 aa, synthetic construct
EVQLVESGGGLVQPGGSLRLSCAASGFTLDYYAIGWFRQAPGKEREGVSCISSSGGSTNYADSVKGRFTISRDNAKNTVYLQMNSLKPEDTAVYYCAAYVYHDYYCSDYVLLRYDYWGQGTQVTVSS

SEQ ID NO: 2371 - protein, 127 aa, synthetic construct
EVQLVESGGGLVQPGGSLRLSCAASGFTLDYYAIGWFRQAPGKEREGVSCISSSGGSTNYADSVKGRFTISRDNAKNTVYLQMNSLKPEDTAVYYCAAYVDPDYYCSDYVLLRYDYWGQGTQVTVSS

SEQ ID NO: 2372 - protein, 131 aa, synthetic construct
EVQLVESGGGLVQPGGSLRLSCAASGFTLDYYAIGWFRQAPGKEREGVSCIRTEISSTGDTTNYADSVKGRFTISRDNAKNTVYLQMNSLKPEDTAVYYCAAYVYPDYYCSEYALSRYDYWGQGTQVTVSS

SEQ ID NO: 2373 - protein, 127 aa, synthetic construct
EVQLVESGGGLVQPGGSLRLSCAASGFTLDYYAIGWFRQAPGKEREGVSCISSSGGRTNYADSVKGRFTISRDNAKNTVYLQMNRLKPEDTAVYYCAAYIYPDYYCSEYDLLRYDYWGQGTQVTVSS

SEQ ID NO: 2374 - protein, 127 aa, synthetic construct
EVQLVESGGGLVQPGGSLRLSCAASGFTLDYYAIGWFRQAPGKEREGVSCISSSGGSTNYADSVKGRFTISRDNAKNTVYLQMNSLKPEDTAVYYCAADVYPDYYCSDYVLLRYDYWGQGTQVTVSS

SEQ ID NO: 2375 - protein, 127 aa, synthetic construct
EVQLVESGGGLVQPGGSLRLSCAASGFTLDYYAIGWFRQAPGKEREGVSCISSSGGSTNYADSVKGRFTISRDNAKNTVYLQMNSLKPEDTAVYYCASYVYPDYYCSEYVLLKYDYWGQGTQVTVSS

SEQ ID NO: 2376 - protein, 127 aa, synthetic construct
EVQLVESGGGLVQPGGSLRLSCAASGFTLDYYAIGWFRQAPGKEREGVSCISSSGGSTNYADSVKGRFTISRDNAKNTVYLQMNSLKPEDTAVYYCAAYVYPDDYCSESVLLRYDYWGQGTQVTVSS

SEQ ID NO: 2377 - protein, 127 aa, synthetic construct
EVQLVESGGGLVQPGGSLRLSCAASGFTLDYYAIGWFRQAPGKEREGVSCISSSGGSTNYADSVKGRFTISRDNAKNTVYLQMNSLKPEDTAVYYCAAYVYPDDYCSDYVLLRYDYWGQGTQVTVSS

SEQ ID NO: 2378 - protein, 127 aa, synthetic construct
EVQLVESGGGLVQPGGSLRLSCAASGFTLDYYAIGWFRQAPGKEREGVSCISSSGGSTNYADSVKGRFTISRDNAKNTVYLQMNSLKPEDTAVYYCAAYDYPDYYCSDYVLLRYDYWGQGTQVTVSS

SEQ ID NO: 2379 - protein, 127 aa, synthetic construct
EVQLVESGGGLVQPGGSLRLSCAASGFTLDYYAIGWFRQAPGKEREGVACISSSGDSTNYADSVKGRFTISRDNAKNTVYLQMNSLKPEDTAIYYCAAYVYPDYYCLEYVLLKYDYWGQGTQVTVSS

SEQ ID NO: 2380 - protein, 127 aa, synthetic construct
EVQLVESGGGLVQPGGSLRLSCAASGFTLDYYAIGWFRQAPGKEREGVSCISSSGDSTNYADSVKGRFTISRDNAKNTVYLQMNSLKPEDTAVYYCAASVYPDYYCSEYVLLKYDYWGQGTQVTVSS

SEQ ID NO: 2381 - protein, 127 aa, synthetic construct
EVQLVESGGGLVQPGGSLRLSCAASGFTLDYYAIGWFRQAPGKEREGVSCISSSGGSTNYADSVKGRFTISRDNAKNTVYLQMNSLKPEDTAVYYCADYVYPDYYCSEYVLLKYDYWGQGTQVTVSS

SEQ ID NO: 2382 - protein, 131 aa, synthetic construct
EVQLVESGGGLVQPGGSLRLSCAASGFTLDYYAIGWFRQAPGKEREGVSCIRTEISSTGDTTNYADSVKGRFTISRDNAKNTVYLQMNSLKPEDTAVYYCAAYVYPDDYCSEYVLSRYDYWGQGTQVTVSS

SEQ ID NO: 2383 - protein, 127 aa, synthetic construct
EVQLVESGGGLVQPGGSLRLSCAASGFTLDYYAIGWFRQAPGKEREGVSCISSSGDSTNYADSVKGRFTISRDNAKNTVYLQMNSLKPEDTAVYYCAAYVYPDYYCSDYDLLRYDYWGQGTQVTVSS

SEQ ID NO: 2384 - protein, 127 aa, synthetic construct
EVQLVESGGGLVQPGGSLRLSCAASGFTLDYYAIGWFRQAPGKEREGVSCISSSGDSTNYADSVKGRFTISRDNAKNTVYLQMNSLKPEDTAVYYCAAYVYPDYYCSDYVPLRYDYWGQGTQVTVSS

SEQ ID NO: 2385 - protein, 127 aa, synthetic construct
EVQLVESGGGLVQPGGSLRLSCAASGFTLDYYAIGWFRQAPGKEREGVSCISSSGGSTNYADSVKGRFTISRDNAKNTVYLQMNSLKFEDTAVYYCAAYVYPDYYCSEYVLSRYDNWGQGTQVTVSS

SEQ ID NO: 2386 - protein, 127 aa, synthetic construct
EVQLVESGGGLVQPGGSLRLSCAASGFTLDYYAIGWFRQAPGKEREGVSCISSSGGSTNYADSVKGRFTISRDNAKNTVYLQMNGLKPEDTAVYYCAAYVYPDYYCSDYVLIRYDYWGQGTQVTVSS

SEQ ID NO: 2387 - protein, 127 aa, synthetic construct
EVQLVESGGGLVQPGGSLRLSCAASGFTLDYYAIGWFRQAPGKEREGVSCISSSGGSTNYADSVKGRFTISRDNAKNTVYLQMNSLKPEDTAVYYCADYVYPDYYCSDYVLLRYDYWGQGTQVTVSS

SEQ ID NO: 2388 - protein, 127 aa, synthetic construct
EVQLVESGGGLVQPGGSLRLSCAASGFTLDYYAIGWFRQAPGKEREGVSCISSSGGSTNYADSVKGRFTISRDNAKNTVYLQMNSLKPEDTAVYYCAAYVYPDYSCSEYVPLRYDYWGQGTQVTVSS

SEQ ID NO: 2389 - protein, 127 aa, synthetic construct
EVQLVESGGGLVQPGGSLRLSCAASGFTLDYYAIGWFRQAPGKEREGVSCISSSGGSTNYADSVKGRFTISRDNAKNTVYLQMNSLKPEDTAVYYCAAYVYPDYYCSDYVLLRYVYWGQGTQVTVSS

SEQ ID NO: 2390 - protein, 127 aa, synthetic construct
EVQLVESGGGLVQPGGSLRLSCAASGFIMDYYAIGWFRQAPGKEREGVSCISSSGDSTNYADSVKGRFTISRDNAKNTVYLQMNSLKPEDTAVYYCAAYVYPDYYCSEYVLLKYGYWGQGTQVTVSS

SEQ ID NO: 2391 - protein, 127 aa, synthetic construct
EVQLVESGGGLVQPGGSLRLSCAASGFTLDYYAIGWFRQAPGKEREGVSCISSSGGSTNYADSVKGRFTISRDNAKNTVYLQMNSLKPEDTAVYYCAAYVYPDYYCTDYVLLRYDYWGQGTQVTVSS

SEQ ID NO: 2392 - protein, 127 aa, synthetic construct
EVQLVESGGGLVQPGGSLRLSCAASGFTLDYYAIGWFRQAPGKEREGVSCISSSGGSTNYADSVKGRFTISRDNAKNTVYLQMNSLKPEDTAVYYCAAYVYPDYYCPDYVLLRYDYWGQGTQVTVSS

SEQ ID NO: 2393 - protein, 127 aa, synthetic construct
EVQLVESGGGLVQPGGSLRLSCAASGFTLDYYAIGWFRQAPGKEREGVSCISSSGDSTNYADSVKGRFTISRDNAKNTVYLQMNSLKPEDTAVYYCAAYVYPDYYCPEYVLLKYDYWGQGTQVTVSS

SEQ ID NO: 2394 - protein, 127 aa, synthetic construct
EVQLVESGGGLVQPGGSLRLSCAASGFTLDYYAIGWFRQAPGKEREGVSCISSSGGSTNYADSVKGRFTISRDNAKNTVYLQMNSLKPEDTAVYYCAAYVYPDYYCSDYVLLRYAYWGQGTQVTVSS

SEQ ID NO: 2395 - protein, 127 aa, synthetic construct
EVQLVESGGGLVQPGGSLRLSCAASGFTLDYYAIGWFRQAPGKEREGVSCISTSGDSTNYADSVKGRFTISRDNAKNTVYLQMNSLKPEDTAVYYCAAYAYPDYYCSDYVLLRYDYWGQGTQVTVSS

SEQ ID NO: 2396 - protein, 127 aa, synthetic construct
EVQLVESGGGLVQPGGSLRLSCAASGFTLDYYAIGWFRQAPGKEREGVSCISTSGDSTNYADSVKGRLTISRDNAKNTVYLQMNSLKPEDTAVYYCAAYVYPDYFCSDYVLLRYDYWGQGTQVTVSS

SEQ ID NO: 2397 - protein, 127 aa, synthetic construct
EVQLVESGGGLVQPGGSLRLSCAASGFTLDYYAIGWFRQAPGKEREGVSCISSSGGSTNYADSVKGRFTISRDNAKNTVYLQMNSLKPEDTAVYYCAAYVYPDYYCSEYVLLKHDYWGQGTQVTVSS

SEQ ID NO: 2398 - protein, 127 aa, synthetic construct
EVQLVESGGGLVQPGGSLRLSCAASEFTLDYYAIGWFRQAPGKEREGVSCISSSGGSTNYADSVKGRFTISRDNAKNTVYLQMNSLKPEDTAVYYCAAYVYPDHYCSDYVLLRYDYWGQGTQVTVSS

SEQ ID NO: 2399 - protein, 127 aa, synthetic construct
EVQLVESGGGLVQPGGSLRLSCAASGFTLDYYAIGWFRQAPGKEREGVSCISSSGGSTNYADSVKGRFTISRDNAKNTVYLQMNSLKPEDTAVYYCAAYVYPDYYCSGYVPSRYDYWGQGTQVTVSS

SEQ ID NO: 2400 - protein, 127 aa, synthetic construct
EVQLVESGGGLVQPGGSLRLSCAASGFTLDYYAIGWFRQAPGKEREGVSCISSSGGSTNYADSVKGRFTISRDNAKNTVYLQMNSLKPEDTAVYYCAAYVYPDYYCSEYVLSRHDYWGQGTQVTVSS

SEQ ID NO: 2401 - protein, 127 aa, synthetic construct
EVQLVESGGGLVQPGGSLRLSCAASGFTLDYYAIGWFRQAPGKEREGVSCISSSGGSTNYADSVKGRFTISRDNAKNTVYLQMNSLKPEDTAVYYCAAYVYPDHYCSDYVLLRYDYWGQGTQVTVSS

SEQ ID NO: 2402 - protein, 127 aa, synthetic construct
EVQLVESGGGLVQPGGSLRLSCAASGFTLDYYAIGWFRQAPGKEREGVSCISSSGGSTNYADSVKGRFTISRDNAKNTVYLQMNSLKPEDTAVYYCAAYVYPEYYCSEYALLRYDYWGQGTQVTVSS

SEQ ID NO: 2403 - protein, 127 aa, synthetic construct
EVQLVESGGGLVQPGGSLRLSCAASGFTLDYYAIGWFRQAPGKEREGVSCISSSGGSTNYADSVKGRFTISRDNAKNTVYLQMNSLKPEDTAVYYCAAYVYPDYYCSDYVLLRYGYWGQGTQVTVSS

SEQ ID NO: 2404 - protein, 131 aa, synthetic construct
EVQLVESGGGLVQPGGSLRLSCAASGFTLDYYAIGWFRQAPGKEREGVSCIRTEISSTGDTTNYADSVKGRFTISRDNAKNTVYLQMNSLKPEDTAVYYCAAYAYPDYYCSEYVLSRYDYWGQGTQVTVSS

SEQ ID NO: 2405 - protein, 127 aa, synthetic construct
EVQLVESGGGLVQPGGSLRLSCAASGFTLDYYAIGWFRQAPGKEREGVSCISSSGDSTNYADSVKGRFTISRDNAKNTVYLQMNSLKPEDTAVYYCAAYVYPEYYCSDYVLLRYDYWGQGTQVTVSS

SEQ ID NO: 2406 - protein, 127 aa, synthetic construct
EVQLVESGGGLVQPGGSLRLSCAASGFTLDYYAIGWFRQAPGKEREGVSCISSSGGSTNYADSVKGRFTISRDNAKNTVYLQMNSLKPEDTAVYYCAAYVYPDYSCSDYVLLRYDYWGQGTQVTVSS

SEQ ID NO: 2407 - protein, 127 aa, synthetic construct
EVQLVESGGGLVQPGGSLRLSCAASGFTLDYYAIGWFRQAPGKEREGVSCISTSGDSTNYADSVKGRFTISRDNAKNTVYLQMNSLKPEDTAVYYCAAYVDPDYYCSDYVLLRYDYWGQGTQVTVSS

SEQ ID NO: 2408 - protein, 127 aa, synthetic construct
EVQLVESGGGLVQPGGSLRLSCAASGFTLDYYAIGWFRQAPGKEREGVSCISSSGGSTNYADSVKGRFTISRDNAKNTVYLQMNSLKPEDTAVYYCAAYFYPDYYCSEYVLLKYDYWGQGTQVTVSS

SEQ ID NO: 2409 - protein, 127 aa, synthetic construct
EVQLVESGGGLVQPGGSLRLSCAASGFTLDYYAIGWFRQAPGKEREGVSCISSSGDSTNYADSVKGRFTISRDNAKNTVYLQMNSLKPEDTAVYYCAAYVYPDYYCSDSVLLRYDYWGQGTQVTVSS

SEQ ID NO: 2410 - protein, 127 aa, synthetic construct
EVQLVESGGGLVQPGGSLRLSCAASGFTLDYYAIGWFRQAPGKEREGVSCISSSGGSTNYADSVKGRFTISRDNAKNTVYLQMNSLKPEDTAVYYCGAYVYPDYYCSDYVLLRYDYWGQGTQVTVSS

SEQ ID NO: 2411 - protein, 127 aa, synthetic construct
EVQLVESGGGLVQPGGSLRLSCAASGFTLDYYAIGWFRQAPGKEREGVSCISSSGGSTNYADSVKGRFTISRDNAKNTVYLQMNSLKPEDTAVYYCEAYVYPDYYCSDYVLLRYDYWGQGTQVTVSS

SEQ ID NO: 2412 - protein, 127 aa, synthetic construct
EVQLVESGGGLVQPGGSLRLSCAASGFTLDYYAIGWFRQAPGKEREGVSCISSSGGSTNYADSVKGRFTISRDNAKNTVYLQMNSLKPEDTAVYYCAAYVYPDNYCSEYVLLRHDYWGQGAQVTVSS

SEQ ID NO: 2413 - protein, 127 aa, synthetic construct
EVQLVESGGGLVQPGGSLRLSCAASGFTLDYYAIGWFRQAPGKEREGVSCISSSGGSTNYADSVKGRFTISRDNAKNTVYLQMNSLKPEDTAVYYCAAYVYPDYYCSDFVLLRYDYWGQGTQVTVSS

SEQ ID NO: 2414 - protein, 127 aa, synthetic construct
EVQLVESGGGLVQPGGSLRLSCAASGFTLDYYAIGWFRQAPGKEREGVSCISSSGGSTNYADSVKGRFTISRDNAKNTVYLQMNSLKPEDTAVYYCAAYVYPDYYCSEYVLLKYVYWGQGTQVTVSS

SEQ ID NO: 2415 - protein, 127 aa, synthetic construct
EVQLVESGGGLVQPGGSLRLSCAASGFTLDYYAIGWFRQAPGKEREGVSCISSSGGSTNYADSVKGRFTISRDNAKNTVYLQMNSLKPEDTAVYYCAAYFYPDYYCSDYVLLRYDYWGQGTQVTVSS

SEQ ID NO: 2416 - protein, 127 aa, synthetic construct
EVQLVESGGGLVQPGGSLRLSCAASGFTLDYYAIGWFRQAPGKEREGVSCISSSGGSTNYADSVKGRFTISRDNAKNTVYLQMNSLKPEDTAVYYCSAYVYPDYYCSDYVLLRYDYWGQGTQVTVSS

SEQ ID NO: 2417 - protein, 127 aa, synthetic construct
EVQLVESGGGLVQPGGSLRLSCAASGFTLDYYAIGWFRQAPGKEREGVSCISSSGGSTNYADSVKGRFTISRDNAKNTVYLQMNSLKPEDTAVYYCAAYVYPDYYCSDSVLLRYDYWGQGTQVTVSS

SEQ ID NO: 2418 - protein, 127 aa, synthetic construct
EVQLVESGGGLVQPGGSLRLSCAASGFTLDYYAIGWFRQAPGKEREGVSCISSSGDSTNYADSVKGRFTISRDNAKNTVYLQMNSLKPEDTAVYYCAAYVYPDYYCTDYVLLRYDYWGQGTQVTVSS

SEQ ID NO: 2419 - protein, 127 aa, synthetic construct
EVQLVESGGGLVQPGGSLRLSCAASGFTLDYYAIGWFRQAPGKEREGVSCISSSGGSTNYADSVKGRFTISRDNAKNTVYLQMNSLKPEDTAVYYCAAYVYPDYYCSEYVPLRYDNWGQGTQVTVSS

SEQ ID NO: 2420 - protein, 127 aa, synthetic construct
EVQLVESGGGLVQPGGSLRLSCAASGFTLDYYAIGWFRQVPGKEREGVSCISSSGGSTNYADSVKGRFTISRDNAKNTVYLQMNSLKPEDTAVYYCAAYVYPDYYCPEYVLLKYDYWGQGTQVTVSS

SEQ ID NO: 2421 - protein, 127 aa, synthetic construct
EVQLVESGGGLVQPGGSLRLSCAASGFTLDYYAIGWFRQAPGKEREGVSCISSSGGSTNYADSVKGRFTISRDNAKNTVYLQMNSLKPEDTAVYYCAAYVYPDYDCSDYVLLRYDYWGQGTQVTVSS

SEQ ID NO: 2422 - protein, 127 aa, synthetic construct
EVQLVESGGGLVQPGGSLRLSCAASGFTLDYYAIGWFRQAPGKEREGVSCISSSGGSTNYADSVKGRFTISRDNAKNTVYLQMNSLKPEDTAVYYCAAYVSPDYYCSDYVLLRYDYWGQGTQVTVSS

SEQ ID NO: 2423 - protein, 127 aa, synthetic construct
EVQLVESGGGLVQPGGSLRLSCAASGFTLDYYAIGWFRQAPGKEREGVSCISTSGDSTNYADSVKGRFTISRDNAKNTVYLQMNSLKPEDTAVYYCAAYVYPEYYCSDYVLLRYDYWGQGTQVTVSS

SEQ ID NO: 2424 - protein, 127 aa, synthetic construct
EVQLVESGGGLVQPGGSLRLSCAASGFTLDYYAIGWFRQAPGKEREGVSCISSSGGSTNYADSVKGRFTISRDNAKNTVYLQMNSLKPEDTAVYYCAASVYPDYYCSEYVPLRYDYWGQGTQVTVSS

SEQ ID NO: 2425 - protein, 127 aa, synthetic construct
EVQLVESGGGLVQPGGSLRLSCAASGFIMDYYAIGWFRQVPGMEREGVSCISSSGDSTNYADSVKGRFTVSRDNAKNTVYLQMNSLKPEDTAVYYCAAYVYPDHYCSEYVLLKYDYWGQGTQVTVSS

SEQ ID NO: 2426 - protein, 127 aa, synthetic construct
EVQLVESGGGLVQPGGSLRLSCAASGFTLDYYAIGWFRQAPGKEREGVSCISSSGGSTNYADSVKGRFTISRDNAKNTVYLQMNSLKPEDTAVYYCAAFVYPDYYCSEYVLLKYDYWGQGTQVTVSS

SEQ ID NO: 2427 - protein, 127 aa, synthetic construct
EVQLVESGGGLVQPGGSLRLSCAASGFTLDYYAIGWFRQAPGKEREGVSCISRDGGSTNYGDSVKGRFTISRDNAKNTVYLQMNSLEPEDTAVYYCAAYVYPDYYCSEYVLLKYDHWGQGTQVTVSS

SEQ ID NO: 2428 - protein, 127 aa, synthetic construct
EVQLVESGGGLVQPGGSLRLSCAASGFTLDYYAIGWFRQAPGKEREGVSCISSSGDSTNYADSVKGRFTISRDNAKNTVYLQMNSLKPEDTAVYYCAAYVSPDYYCSEYVLLKYDYWGQGTQVTVSS

SEQ ID NO: 2429 - protein, 127 aa, synthetic construct
EVQLVESGGGLVQPGGSLRLSCAASGFTLDYYAIGWFRQAPGKEREGVSCISSSGGSTNYADSVKGRFTISRDNAKNTVYLQMNSLKPEDTAVYYCAAYVYPDYSCSEYVLLKYDYWGQGTQVTVSS

SEQ ID NO: 2430 - protein, 131 aa, synthetic construct
EVQLVESGGGLVQPGGSLRLSCAASGFTLDYYAIGWFRQAPGKEREGVSCIRTEISSTGDTTNYADSVKGRFTISRDNAKNTVYLQMNSLKPEDTAVYYCAAYVYPDYSCSEYVLSRYDYWGQGTQVTVSS

SEQ ID NO: 2431 - protein, 127 aa, synthetic construct
EVQLVESGGGLVQPGGSLRLSCAASGFTLDYYAIGWFRQAPGKEREGVSCISSSGGSTNYADSVKGRFTISRDNAKNTVYLQMNSLKPEDTAVYYCAAYVYSDYYCSDYVLLRYDYWGQGTQVTVSS

SEQ ID NO: 2432 - protein, 127 aa, synthetic construct
EVQLVESGGGLVQPGGSLRLSCAASGFIMDYYAIGWFRQAPGKEREGVSCISSSGDSTNYADSVKGRFTISRDNAKNTVYLQMNSLKPEDTAVYYCAAYVDPDYYCSEYVLLKYDYWGQGTQVTVSS

SEQ ID NO: 2433 - protein, 127 aa, synthetic construct
EVQLVESGGGLVQPGGSLRLSCAASGFIMDYYAIGWFRQAPGKEREGVSCISSSGDSTNYADSVKGRFTISRDNAKNTVYLQMNSLKPEDTAVYYCAAYVYPDYYCSEYGLLKYDYWGQGTQVTVSS

SEQ ID NO: 2434 - protein, 127 aa, synthetic construct
EVQLVESGGGLVQPGGSLRLSCAASGFTLDYYAIGWFRQAPGKEREGVSCISSSGGSTNYADSVKGRFTISRDNAKNTVYLQMNSLKPEDTAIYYCAAYVYPDYYCSEYVLSKYDYWGQGTQVTVSS

SEQ ID NO: 2435 - protein, 131 aa, synthetic construct
EVQLVESGGGLVQPGGSLRLSCAASGFTLDYYAIGWFRQAPGKEREGVSCIRTEISSTGDTTNYADSVKGRFTISRDNAKNTVYLQMNSLKPEDTAVYYCAAYVDPDYYCSEYVLSRYDYWGQGTQVTVSS

SEQ ID NO: 2436 - protein, 127 aa, synthetic construct
EVQLVESGGGLVQPGGSLRLSCAASGFTLDYYAIGWFRQAPGKEREGVSCISSSGGSTNYADSVKGRFTISRDNAKDTVYLQMNSLKPEDTAVYYCAAYVYPDYYCSDYVLSRYDYWGQGTQVTVSS

SEQ ID NO: 2437 - protein, 127 aa, synthetic construct
EVQLVESGGGLVQPGGSLRLSCAASGFTLDYYAIGWFRQAPGKEREGVSCISTSGDSTNYADSVKGRFTISRDNAKNTVYLQMNSLKPEDTAVYYCAAYVYPDDYCSDYVLLRYDYWGQGTQVTVSS

SEQ ID NO: 2438 - protein, 127 aa, synthetic construct
EVQLVESGGGLAQPGGSLRLSCAASGFTLDYYSIGWFRQAPGKEREGVSCISSSGDSTNYADSVKGRFTISRDNAKNTVYLQMNSLKPEDTAVYYCAAYVYPDYYCSEYVKLKYDYWGQGTQVTVSS

SEQ ID NO: 2439 - protein, 127 aa, synthetic construct
EVQLVESGGGLVQPGGSLRLSCAASGSTLDYYAIGWFRQAPGKEREGVSCISSSGGSTNYADSVKGRFTISRDNAKNTVYLQMNSLKPEDTAVYYCAAYVYPDYYCSDYDLLRYDYWGQGTQVTVSS

SEQ ID NO: 2440 - protein, 127 aa, synthetic construct
EVQLVESGGGLVQPGGSLRLSCAASGFTLDYYAIGWFRQAPGKEREGVSCISSSGDSTNYADSVKGRFTISRDNAKNTVYLQMNSLKPEDTAVYYCAAYVYPDHYCSEYVLLKYDYWGQGTQVTVSS

SEQ ID NO: 2441 - protein, 127 aa, synthetic construct
EVQLVESGGGLVQPGGSLRLSCAASGFTLDYYAIGWFRQAPGKEREGVSCISTSGDSTNYADSVKGRFTISRDNAKNTVYLQMNSLKPEDTAVYYCAASVYPDYYCSDYVLLRYDYWGQGTQVTVSS

SEQ ID NO: 2442 - protein, 127 aa, synthetic construct
EVQLVESGGGLVQPGGSLRLSCAASGFTLDYYAIGWFRQAPGKEREGVSCISSSGDSTNYADSVKGRFTISRDNAKNTVYLQMNSLKPEDTAVYYCADYVYPDYYCSDYVLLKYDYWGQGTQVTVSS

SEQ ID NO: 2443 - protein, 127 aa, synthetic construct
EVQLVESGGGLVQPGGSLRLSCAASGFTLDYYAIGWFRQAPGKEREGVSCISSSGDSTNYADSVKGRFTISRDNAKNTVYLQMNSLKPEDTAVYYCAAYVDPDYYCSDYVLLKYDYWGQGTQVTVSS

SEQ ID NO: 2444 - protein, 127 aa, synthetic construct
EVQLVESGGGLVQPGGSLRLSCAASGFTLDYYAIGWFRQAPGKEREGVSCISSSGGSTNYADSVKGRFTISRDNAKNTVYLQMNSLKPEDTAVYYCAAYDYPDYYCSDYVLLKYDYWGQGTQVTVSS

SEQ ID NO: 2445 - protein, 127 aa, synthetic construct
EVQLVESGGGLVQPGGSLRLSCAASGFTLDYYAIGWFRQAPGKEREGVSCISSSGGSTNYADSVKGRFTISRDNAKNTVYLQMNSLKPEDTAVYYCAAYVYPDDSCSDYDLLRYDYWGQGTQVTVSS

SEQ ID NO: 2446 - protein, 127 aa, synthetic construct
EVQLVESGGGLVQPGGSLRLSCAASGFTLDYYAIGWFRQAPGKEREGVSCISSSGGSTNYADSVKGRFTISRDNAKNTVYLQMNSLKPEDTAVYYCAVYVYPDYYCSDYVLLRYDYWGQGTQVTVSS

SEQ ID NO: 2447 - protein, 127 aa, synthetic construct
EVQLVESGGGLVQPGGSLRLSCAASGFTLDYYAIGWFRQAPGKEREGVSCISSSGGSTNYADSVKGRFTISRDNAKNTVYLQMNSLKPEDTAVYYCAAYVYPDDYCSDSDLLRYDYWGQGTQVTVSS

SEQ ID NO: 2448 - protein, 127 aa, synthetic construct
EVQLVESGGGLVQPGGSLRLSCAASGFTLDYYAIGWFRQAPGKEREGVSCISSSGDSTNYADSVKGRFTISRDNAKNTVYLQMNSLKPEDTAVYYCAAYVYPDYYCSDYVLLRYDHWGQGTQVTVSS

SEQ ID NO: 2449 - protein, 127 aa, synthetic construct
EVQLVESGGGLVQPGGSLRLSCAASGFTLDYYAIGWFRQAPGKEREGVSCISSSGGSTNYADSVKGRFTISRDNAKNTVYLQMNSLKPEDTAVYYCAAYVYPDYYCSDYVLLRYDHWGQGTQVTVSS

SEQ ID NO: 2450 - protein, 127 aa, synthetic construct
EVQLVESGGGLVQPGGSLRLSCAASGFTLDYYAIGWFRQAPGKEREGVSCISSSGGSTNYADSVKGRFTISRDNAKNTVYLQMNSLKPEDTAVYYCAAYVYPDYYCSDYVLLRYDDWGQGTQVTVSS

SEQ ID NO: 2451 - protein, 127 aa, synthetic construct
EVQLVESGGGLVQPGGSLRLSCAASGFTLDYYAIGWFRQAPGKEREGVSCISTSGDSTNYADSVKGRFTISRDNAKNTVYLQMNSLKPEDTAVYYCAVYVYPDYYCSDYVLLRYDYWGQGTQVTVSS

SEQ ID NO: 2452 - protein, 127 aa, synthetic construct
EVQLVESGGGLVQPGGSLRLSCAASGFTLDYYAIGWFRQAPGKEREGVSCISSSGGSTNYADSVKGRFTISRDNAKNTVYLQMNSLKPEDTAVYYCAAYVYPDYYCSDYVLFRYDYWGQGTQVTVSS

SEQ ID NO: 2453 - protein, 127 aa, synthetic construct
EVQLVESGGGLVQPGGSLRLSCAASGFTLDYYAIGWFRQAPGKEREGVSCISSSGGSTNYADSVKGRFTISRDNAKNTVYLQMNSLKPEDTAVYYCADYVYPDYYCSDYDLLRYDYWGQGTQVTVSS

SEQ ID NO: 2454 - protein, 127 aa, synthetic construct
EVQLVESGGGLVQPGGSLRLSCAASGFTLDYYAIGWFRQAPGKEREGVSCISSSGGSTNYADSVKGRFTISRDNAKNTVYLQMNSLKPEDTAVYYCAAYVDPDYYCSDYDLLRYDYWGQGTQVTVSS

SEQ ID NO: 2455 - protein, 127 aa, synthetic construct
EVQLVESGGGLVQPGGSLRLSCAASGFTLDYYAIGWFRQAPGKEREGVSCISSSGGSTNYADSVKGRFTISRDNAKNTVYLQMNSLKPEDTAVYYCAASVYPDYYCSDYDLLRYDYWGQGTQVTVSS

SEQ ID NO: 2456 - protein, 127 aa, synthetic construct
EVQLVESGGGLVQPGGSLRLSCAASGFTLDYYAIGWFRQAPGKEREGVSCISSSGGSTNYADSVKGRFTISRDNAKNTVYLQMNSLKPEDTAVYYCAAYDYPDYYCSDYDLLRYDYWGQGTQVTVSS

SEQ ID NO: 2457 - protein, 117 aa, synthetic construct
EVQLVESGGGLVQAGGSLRLSCAASGIPLYAMGWYRQAPGKQRELVASISSGGNAHYAEFVKGRFTISRDNANKMVYLEMSSVKPEDTGVYYCNIYRPQVPTTRYSWGQGTQVTVSS

SEQ ID NO: 2458 - protein, 119 aa, synthetic construct
EVQLVESGGGLVQAGGSLTLSCATSGLFFAQTAMGWYRQAPGKQRELVASISSSGQTRYAEAVKGRFSVSRDNAENTVYLQMRSVEPEDTGVYYCNIYRSQVPLTRYSWGQGTQVTVSS

SEQ ID NO: 2459 - protein, 117 aa, synthetic construct
EVQLVESGGGLVQAGGSLRLSCAASGMPSVAMGWYRQAPGKQRELVASISSGGNTHYAEFVKGRFTISRDNAKKMVYLQMSSVKPEDTGVYYCNIYRSQVPPTRYSWGQGTQVTVSS

SEQ ID NO: 2460 - protein, 117 aa, synthetic construct
EVQLVESGGGLVQAGGSLRLSCAASGIPLVAMGWYRQAPGKQRELVASISSGGNTHYAEFVKGRFTISRDNANKMVYLQMSSVKPEDTGVYYCNIYRSQVPFTRYSWGQGTQVTVSS

SEQ ID NO: 2461 - protein, 117 aa, synthetic construct
EVQLVESGGGLVQAGGSLRLSCAASGIPLYAMGWYRQAPGKQRELVASISSGGNTHYAEFVKGRFTISRDNANKMVYLEMSSVKPEDTGVYYCNIYRPQVPTTRYSWGQGTQVTVSS

SEQ ID NO: 2462 - protein, 117 aa, synthetic construct
EVQLVESGGGLVQAGGSLSLSCAASGMPFVAMGWYRQAPGKQRELVASISTGGNTQYAEFVKGRFTISRDNAKKMVYLQMSSVKPEDTGVYYCNIYRSQVSPTRYSWGQGTQVTVSS

SEQ ID NO: 2463 - protein, 118 aa, synthetic construct
EVQLVESGGGLVQAGGSLRLSCAVSGIPFALAMGWYRQAPGKQRELVASISSGGNTHYAEFVKGRFTISRDSANKMVYLQMSSVKPEDAGVYYCNIYRSQIPSTRYSWGQGTQVTVSS

SEQ ID NO: 2464 - protein, 117 aa, synthetic construct
EVQLVESGGGLVQAGGSLRLSCAASGMPFVAMGWYRQTPGKQRELVASIGSGGDTRYAEFVKGRFTISRDNAKKMVYLQMNSVKPEDAGVYYCNIYRSQVSPTRYSWGQGTQVTVSS

SEQ ID NO: 2465 - protein, 119 aa, synthetic construct
EVQLVESGGGLVQAGGSLRLSCAVSGIPSPLPAMGWYRQAPGKQRELVASISSGGNTRYAEFVKGRFTISRDNANKMVYLQMSSVKPEDTGVYYCNIYRSQIPSTRYSWGQGTQVTVSS

SEQ ID NO: 2466 - protein, 117 aa, synthetic construct
EVQLVESGGGLVQAGGSLRLSCAASGIPLYAMGWYRQAPGKQRELVASISSGGNTHYAEFVKGRFTISRDNANKMVYLEMSSLKPEDTGVYYCNIYRPQVPTTRYSWGQGTQVTVSS

SEQ ID NO: 2467 - protein, 117 aa, synthetic construct
EVQLVESGGGLVQAGGSLRLSCAASGMPFVAMGWYRQAPGKQRELVASISSGGNTHYAEFVKGRFTISRDNAKKMVYLQMSSVKPEDTGVYYCNIYRSQVSPTRYSWGQGTQVTVSS

SEQ ID NO: 2468 - protein, 119 aa, synthetic construct
EVQLVESGGGLVQAGGSLRLSCEASGIPSPLPAMGWYRQAPGKQRELVASISSGGNTRYAEFVKGRFTISRDNANKMVYLQMSSVKPEDTGVYYCNIYRSQIPSTRYSWGQGTQVTVSS

SEQ ID NO: 2469 - protein, 119 aa, synthetic construct
EVQLVESGGGLVQAGGSLRLSCAASGIPFALAAMGWYRQAPGKQRELVASISSGGNTRYAEFVKGRFTISRDNANKMVYLQMSSVKPEDTGVYYCNIYRSQVPSTRYSWGQGTQVTVSS

SEQ ID NO: 2470 - protein, 119 aa, synthetic construct
EVQLVESGGGLVQAGGSLRLSCAASGIPFALPAMGWYRQAPGKQREVVASISSGGDTHYAEFVKGRFTISRDNANKMVYLQMSSVKPEDTGVYYCNIYRSQVPTTRYSWGQGTQVTVSS

SEQ ID NO: 2471 - protein, 119 aa, synthetic construct
EVQLVESGGGLVQAGGSLRLSCAASGMPFALTAMGWYRQAPGKQRELVASISSGGNTHYAEFVKGRFTISRDNANKMLFLQMSSVKPEDTGVYYCNIYRSQVPTTRYSWGQGTQVTVSS

SEQ ID NO: 2472 - protein, 117 aa, synthetic construct
EVQLVESGGGLVQAGGSLRLSCAASGMPLTAMGWYRQAPGKQRELVASISSGGNTRYAEFVKGRFTISRDNANKMVFLQMSSVKPEDTGVYYCNIYRSQVPLTRYSWGQGTQVTVSS

SEQ ID NO: 2473 - protein, 119 aa, synthetic construct
EVQLVESGGGLVQAGGSLRLSCAASGIPSPLPAMGWYRQAPGEQRELVASISSGGNTRYAEFVKGRFTISRDNANKMVYLQMSSLKPEDTGVYYCNIYRSQVPSTRFAWGQGTQVTVSS

SEQ ID NO: 2474 - protein, 117 aa, synthetic construct
EVQLVESGGGLVQAGGSLRLSCAASGMPAVAMGWYRQAPGKQRELVASISSGDNTQYAEFVKGRFTISRDNAKKMVYLQMSSVKPEDTGVYYCNIYRSQVPPTRYSWGQGTQVTVSS

SEQ ID NO: 2475 - protein, 119 aa, synthetic construct
EVQLVESGGGLVQAGGSLTLSCATSGLFFAQTAMGWYRQAPGKQRELVASISSSGQTRYAEAVKGRFTVSRDNAKNTVYLQMRSVEPEDTGVYYCNIYRSQVPLTRYSWGQGTQVTVSS

SEQ ID NO: 2476 - protein, 119 aa, synthetic construct
EVQLVESGGGLVQAGGSLRLSCAASGIPFALTAMGWYRQTPGKQRELVASISSGGDTRYAEFVKGRFTISRDNANKMVYLQLSSVKPEDTGVYYCNIYRSQIPPTRYSWGQGTQVTVSS

SEQ ID NO: 2477 - protein, 117 aa, synthetic construct
EVQLVESGGGLVQAGGSLRLSCAASGMPFVAMGWYRQAPGKQRELVASISSGGATQYAEFVKGRFTISRDNAKKMVYLQMSSVKPEDTGVYYCNIYRSQIPPTRYSWGQGTQVTVSS

SEQ ID NO: 2478 - protein, 119 aa, synthetic construct
EVQLVESGGGLVQAGGSLRLSCAAHGIPSPLPAMGWYRQAPGKQRELVASISSAGNTHYAEFVKGRFTISRDNANKMVYLQMSSVKPEDTGVYYCNIYRSQVPSTRYSWGQGTQVTVSS

SEQ ID NO: 2479 - protein, 117 aa, synthetic construct
EVQLVESGGGLVQAGGSLRLSCAASGMPAVAMGWYRQAPGKQRELVASISSGGNTHYAEFVKGRFTISRDNAKKMVYLQMSSVKPEDTGVYYCNIYRSQVPFTRYSWGQGTQVTVSS

SEQ ID NO: 2480 - protein, 117 aa, synthetic construct
EVQLVESGGGLVQAGGSLRLSCAASGIPLYAMGWYRQAPGKQRELVASISSGGNTHYAEFVKGRFTISRDNANKMVYLEMSSLKPEDTGVYYCNIYRPRVPTTRYSWGQGTQVTVSS

SEQ ID NO: 2481 - protein, 119 aa, synthetic construct
EVQLVESGGGLVQAGGSLRLSCAASGIPSPLPAMGWYRQAPGKQRELVASISSAGNTHYAEFVEGRFTISRDNANKMVYLQMSSVRPEDTGVYYCNIFRSQIPTTRYSWGQGTQVTVSS

SEQ ID NO: 2482 - protein, 117 aa, synthetic construct
EVQLVESGGGLVQAGGSLRLSCAASGIPLVAMGWYRQAPGKQRELVASISSGGNTHYAEFVKGRFTISRDNANKMVYLQMSSVKPEDTGVYYCNIYRSQVPSTRYSWGQGTQVTVSS

SEQ ID NO: 2483 - protein, 117 aa, synthetic construct
EVQLVESGGGLVQAGGSLRLSCAASGIPLYAMGWYRQAPGKQRELVASISSGGNTHYAEFVKGRFTISRDNANKMVYLEMSSVKPEDTGVYYCNIYRPRVPTTRYSWGQGTQVTVSS

SEQ ID NO: 2484 - protein, 116 aa, synthetic construct
EVQLVESGGGLVQAGGSLRLSCAASGIPFALAWYRQAPGKQRELVASISSGGNTQYAEFVKGRFTISRDNANKMVYLQMSSVKPEDTGVYYCNIYRSQVPFTRYSWGQGTQVTVSS

SEQ ID NO: 2485 - protein, 117 aa, synthetic construct
EVQLVESGGGLVQAGGSLRLSCAASGMPLVAMGWYRQAPGKQRELVASISSGGNTGYAEFVKGRFTISRDNAKKMVYLQMNSVKPEDTGVYYCNIYRSQGPPTRYSWGQGTQVTVSS

SEQ ID NO: 2486 - protein, 117 aa, synthetic construct
EVQLVESGGGLVQAGGSLRLSCAASGIPLYAMGWYRQAPGKQRELVASISSGGNTHYSEFVKGRFTISRDNANKMVYLEMSSVKPEDTGVYYCNIYRPQIPTTRYSWGQGTQVTVSS

SEQ ID NO: 2487 - protein, 117 aa, synthetic construct
EVQLVESGGDLVQAGGSLRLSCAASGIPLYAMGWYRQAPGKQRELVASISSGGNTHYAEFVKGRFTILRDNANKMVYLEMSSLKPEDTGVYYCNIYRPRVPTTRYSWGQGTQVTVSS

SEQ ID NO: 2488 - protein, 117 aa, synthetic construct
EVQLVESGGGLVQAGGSLRLSCAASGMPSVAMGWYRQAPGKQRELVASIGSGGDTRYAEFVKGRFTISRDNAKKMVYLQMSSVKPEDTGVYYCNIYRSQVRPTRYSWGQGTQVTVSS

SEQ ID NO: 2489 - protein, 117 aa, synthetic construct
EVQLVESGGGLVQAGGSLRLSCAASGMPLVAMGWYRQAPGKQRELVASISSGGNTGYAEFVKGRFTISRDNAKKMVYLQMNSVKPEDTGVYYCNIYRSQVQPTRYSWGQGTQVTVSS

SEQ ID NO: 2490 - protein, 117 aa, synthetic construct
EVQLVESGGGLVQAGGSLRLSCAASGIPLYAMGWYRQAPGKQRELVASISSGGNTHYAEFVKGRFTISRDNANKMVYLEMSSLKPEDTGVYYCNIYRPQGPTTRYSWGQGTQVTVSS

SEQ ID NO: 2491 - protein, 117 aa, synthetic construct
EVQLVESGGGLVQAGGSLRLSCAASGIPLYAMGWYRQAPGKQRELVASISSGGNTHYAEFVKGRFTISRDNANKMVYLEMSSVKPEDTGVYYCNIYRPQGPTTRYSWGQGTQVTVSS

SEQ ID NO: 2492 - protein, 117 aa, synthetic construct
EVQLVESGGGLVQAGGSLRLSCAASGMPLVAMGWYRQAPGKQRELVASISSGGNTGYAEFVKGRFTISRDNAKKMVYLQMNSVKPEDTGVYYCNIYRPQVPPTRYSWGQGTQVTVSS

SEQ ID NO: 2493 - protein, 117 aa, synthetic construct
EVQLVESGGGLVQAGGSLRLSCAASGMPAVAMGWYRQAPGKQRELVASISSGGNTHYAEFVKGRFTISRDNAKKMVYLQMSSVKPEDTGVYYCNIYRPQVPPTRYSWGQGTQVTVSS

SEQ ID NO: 2494 - protein, 119 aa, synthetic construct
EVQLVESGGGLVQAGGSLRLSCAASGIPFALPAMGWYRQAPGNERELVASISSGGNTSYAEFTKGRFTISRDNANKMVYLQMSSVRPEDTGVYYCNIYRSRVPSTRYSWGQGTQVTVSS

SEQ ID NO: 2495 - protein, 119 aa, synthetic construct
EVQLVESGGGLVQAGGSLRLSCAASGIPFALTAMGWYRQTPGKQRELVASISSGGDIGYAEFVKGRFTISRDNANKMVYLQLSSVKPEDTGVYYCNIYRSQIPPTRYSWGQGTQVTVSS

SEQ ID NO: 2496 - protein, 119 aa, synthetic construct
EVQLVESGGGLVQAGGSLRLSCAASGIPFALPAMGWYRQAPGKQRELVASISSGGNTHYAEFVKGRFTISRDNANKMVYLQMSSVKPEDTGVYYCNIYRSQVPTTRYSWGQGTQVTVSS

SEQ ID NO: 2497 - protein, 119 aa, synthetic construct
EVQLVESGGGLVQAGGSLRLSCAASGIPFALPAMGWYRQAPGKQRELVASISSGGNTSYAEFTKGRFTISRDNANKMVYLQMSSVKPEDTGVYYCNIYRSRVPSTRYSWGQGTQVTVSS

SEQ ID NO: 2498 - protein, 116 aa, synthetic construct
EVQLVESGGGLVQAGGSLRLSCVASGIPFALAWYRQAPGKQRELVASISSGGNTQYAEFVKGRFTISRDNANKMVYLQMSSVKPEDTGVYYCNIYRSQVPFTRYSWGQGTQVTVSS

SEQ ID NO: 2499 - protein, 117 aa, synthetic construct
EVQLVESGGGLVQAGGSLGLSCAASGIPLVAMGWYRQAPGKQRELVASISSGGNTHYAEFVKGRFTISRDNANKMVYLQMSSVKPEDTGVYYCNIYRSQVPFTRYSWGQGTQVTVSS

SEQ ID NO: 2500 - protein, 119 aa, synthetic construct
EVQLVESGGGLVQAGGSLRLSCAASGIPFALTAMGWYRQAPGKQRELVASISSGANTHYAEFVKGRFTISRDNANKMLYLQMSSVKPEDTGVYYCNIYRSQVPTTRYSWGQGTQVTVSS

SEQ ID NO: 2501 - protein, 117 aa, synthetic construct
EVQLVESGGGLVQAGGSLRLSCATSGMPFVAMGWYRQAPGKQRELVASISSGGDTHYAEFVKGRFTISRDNAKKMVYLQMTSVKPEDTGVYYCNIYRSQIPPTRYSWGQGTQVTVSS

SEQ ID NO: 2502 - protein, 117 aa, synthetic construct
EVQLVESGGGLVQAGGSLRLSCAASGIPLYAMGWYRQAPGKQRELVASISSGGNTHYAEFVKGRFTISRDNANKMVYLEMSSVKPEDTGVYYCNIYRPQIPTTRYSWGQGTQVTVSS

SEQ ID NO: 2503 - protein, 117 aa, synthetic construct
EVQLVESGGGLVQAGGSLRLSCAASGIPLYAMGWYRQAPGKQRELVASISSGGNTHYAEFVKGRFTISRDNANKMVYLEMSTVKPEDTGVYYCNIYRPLVPTTRYSWGQGTQVTVSS

SEQ ID NO: 2504 - protein, 117 aa, synthetic construct
EVQLVESGGGLVQAGGSLRLSCAASGMPFVAMGWYRQAPGKQRELVASISSGGDTRYAEFVKGRFTISRDNDKKMVYLQMDSVKPDDTGVYYCNIYRSRVPPTRYSWGQGTQVTVSS

SEQ ID NO: 2505 - protein, 119 aa, synthetic construct
EVQLVESGGGLVQAGGSLRLSCAASGIPFALPAMGWYRQAPGKQRELVASISSGGNTHYAEFVKGRFTISRDNANKMVYLQMSSVKPEDTGVYYCNIYRSRVPPTRYSWGQGTQVTVSS

SEQ ID NO: 2506 - protein, 119 aa, synthetic construct
EVQLVESGGGLVQAGGSLRLSCAASGIPFALPAMGWYRQAPGKQRELVASISSVGNTHYAEFVKGRFTISRDNANKMVYLQMSSVKPEDTGVYYCNIYRSHVPPTRYSWGQGTQVTVSS

SEQ ID NO: 2507 - protein, 117 aa, synthetic construct
EVQLVESGGGLVQAGGSLRLSCAASGMPAVAMGWYRQAPGKQRELVASISSGDNTQYAEFVKGRFTISRDNAKKMVYLQMSSVKPEDTGVYYCNIYRSQGPPTRYSWGQGTQVTVSS

SEQ ID NO: 2508 - protein, 117 aa, synthetic construct
EVQLVESGGGLVQAGGSLRLSCAASGIPLYAMGWYRQAPGKQRELVASISSGGNTHYAEFVKGRFTISRDNANKMVYLEMRSVKPEDTGVYYCNIYRPQIPTTRYSWGQGTQVTVSS

SEQ ID NO: 2509 - protein, 117 aa, synthetic construct
EVQLVESGGGLVQAGGSLRLSCAASGMPFVAMGWYRQAPGKQRELVASISTGGNTHYAEFVEGRFTISRDNAKKMVYLQMSSVKPEDTGVYYCNIYRSQVPPTRYSWGQGTQVTVSS

SEQ ID NO: 2510 - protein, 117 aa, synthetic construct
EVQLVESGGGLVQAGGSLRLSCAASGIPLYAMGWYRQAPGKQRELVASISSGGNTHYAEFVKGRFTISRDNANKMVYLEMSSVKPEDTGVYYCNIYRPLVPTTRYSWGQGTQVTVSS

SEQ ID NO: 2511 - protein, 117 aa, synthetic construct
EVQLVESGGGLVQAGGSLRLSCAASGMPSVAMGWYRQAPGKQRELVASISSGGNTHYAEFVKGRFTISRDNAKKMVYLQMSSVKPEDTGVYYCNIYRSQGPPTRYSWGQGTQVTVSS

SEQ ID NO: 2512 - protein, 117 aa, synthetic construct
EVQLVESGGGLVQAGGSLRLSCAASGMPLVAMGWYRQAPGKQRELVASISSGGNTGYAEFVKGRFTISRDNAKKMVYLQMNSVKPEDTGVYYCNIYRTQVPPTRYSWGQGTQVTVSS

SEQ ID NO: 2513 - protein, 117 aa, synthetic construct
EVQLVESGGGLVQAGGSLRLSCAASGMPSVAMGWYRQAPGKQRELVASISSGGNTHYAEFVKGRFTISRDNAKKMVYLQMSSVKPEDTGVYYCNIYRTQVPPTRYSWGQGTQVTVSS

SEQ ID NO: 2514 - protein, 117 aa, synthetic construct
EVQLVESGGGLVQAGGSLRLSCAASGMPAVAMGWYRQAPGTQRELVASISSGGNTHYAEFVKGRFTISRDNARKMVYLQMSSVKPEDTGVYYCNIYRPQVPPTRYSWGQGTQVTVSS

SEQ ID NO: 2515 - protein, 119 aa, synthetic construct
EVQLVESGGGLVQAGGSLRLSCAASGIPSPLPAMGWYRQAPGEQRELVASISSGGNTRYAESVKGRFTISRDNANKMVYLQMSSLKPEDTGVYYCNIYRSQVPSTRFAWGQGTQVTVSS

SEQ ID NO: 2516 - protein, 119 aa, synthetic construct
EVQLVESGGGLVQTGGSLRLSCAASGKFFALAAMGWYRQAPGKQRELVASISSGSNTQYAEFVKGRFTISRDNAKNTLYLQMNSVKPEDTGVYYCNIYRSQVPPTRYSWGQGTQVTVSS

SEQ ID NO: 2517 - protein, 119 aa, synthetic construct
EVQLVESGGGLVQPGGSLRLSCAASGIPSPLPAMGWYRQAPGEQRELVASISSGGNTRYAEFVKGRFTISRDNANKMVYLQMSSLKPEDTGVYYCNIYRSQVPSTRFAWGQGTQVTVSS

SEQ ID NO: 2518 - protein, 119 aa, synthetic construct
EVQLVESGGGLVQAGGSLRLSCAASGIPFALPAMGWYRQAPGKQRELVASISSGGNTTYAEFTKGRFTISRDNANKMVYLQMSSVKPEDTGVYYCNIYRSGVPSTRYSWGQGTQVTVSS

SEQ ID NO: 2519 - protein, 119 aa, synthetic construct
EVQLVESGGGLVQAGGSLRLSCATSGIPFALPAMGWYRQAPGKQRELVASISSGGNTNYAEFTKGRFTISRDNANKMVYLQMSSVKPEDTGVYYCNIYRSGVPSTRYSWGQGTQVTVSS

SEQ ID NO: 2520 - protein, 117 aa, synthetic construct
EVQLVESGGGLVQAGGSLRLSCAASGIPLVAMGWYRQAPGKQRELVASISSGGNTRYAEFVKGRFTISRDNANKMVYLQMSSVKPEDTGVYYCNIYRSEVPPTRYSWGQGTQVTVSS

SEQ ID NO: 2521 - protein, 117 aa, synthetic construct
EVQLVESGGGLVQAGGSLRLSCAASGMPLVAMGWYRQAPGKQRELVASISSGGNTGYAEFVKGRFTISRDNAKKMVYLQMNSVKPEDTGVYYCNIYRSQAPPTKYSWGQGTQVTVSS

SEQ ID NO: 2522 - protein, 117 aa, synthetic construct
EVQLVESGGGLVQAGGSLRLSCAASGIPLYAMGWYRQAPGKQRELVASISSGGNTHYAEFVKGRFTISRDNANKMVYLEMSSVKPEDTGVYYCNIYRPHVPTTRYSWGQGTQVTVSS

SEQ ID NO: 2523 - protein, 119 aa, synthetic construct
EVQLVESGGGLVQAGGSLRLSCAASGMPFALTAMGWYRQAPGKQRELVASISSGGNTHYAEFVKGRFTISRDNANKMLFLQMSSVKPEDTGVYYCNIYRSQGPTTRYSWGQGTQVTVSS

SEQ ID NO: 2524 - protein, 119 aa, synthetic construct
EVQLVESGGGLVQTGGSLRLSCAASGMFFAQTAMGWYRQAPGKQRELVASISSGSNTRYAEFVKGRFTISRDNAKNTVYLQMNSVKPEDTGVYYCNIYRSQAPPTRYSWGQGTQVTVSS

SEQ ID NO: 2525 - protein, 119 aa, synthetic construct
EVQLVESGGGLVQAGGSLRLSCAASGIPFALTAMGWYRQAPGKQRELVASISSAGNTHYAEFVEGRFTISRDVANKMVYLQMSSVKPEDTGVYYCNIYRPQVPSTRYSWGQGTQVTVSS

SEQ ID NO: 2526 - protein, 119 aa, synthetic construct
EVQLVESGGGLVQAGGSLRLSCAASGIPFALPAMGWYRQAPGKERELVASISSGGNTTYAEFTKGRFTISRDDANKMVYLQMSSVKPEDTGVYYCNIYRSRVPSTRYSWGQGTQVTVSS

SEQ ID NO: 2527 - protein, 119 aa, synthetic construct
EVQLVESGGGLAQAGGSLRLSCAASGIPSPLPAVGWYRQAPGEQRELVASISSGGNTRYAEFVKGRFTISRDNANKMVYLQMSSLKPEDTGVYYCNIYRSQVPSTRFAWGQGTQVTVSS

SEQ ID NO: 2528 - protein, 117 aa, synthetic construct
EVQLVESGGGLVQAGGSLRLSCAASGIPLYAMGWYRQAPGKQRELVASISRGGNTHYAEFVKGRFTISRDNANKMVYLEMSTVKPEDTGVYYCNIYRPHVPTTRYSWGQGTQVTVSS

SEQ ID NO: 2529 - protein, 117 aa, synthetic construct
EVQLVESGGGLVQAGGSLRLSCAASGMPFVAMGWYRQAPGKQRELVASISTGGNTHYAEFVEGRFTISRDNAKKMVYLQMSSVKPEDTGVYYCNIYRSEVPPTRYSWGQGTQVTVSS

SEQ ID NO: 2530 - protein, 117 aa, synthetic construct
EVQLVESGGGLVQAGGSLRLSCAASGIPLVAMGWYRQAPGKQRELVASISSGGNTRYAESVKGRFTISRDNANKMVYLQMSSVKPEDTGVYYCNIYRSEVPPTRYSWGQGTQVTVSS

SEQ ID NO: 2531 - protein, 119 aa, synthetic construct
EVQLVESGGGLVQPGGSLRLSCAASGIPFALPAMGWYRQAPGKQRELVASIGSVGNTHYAEFVKGRFTISRDNANKMVYLQMSSVKPEDTGVYYCNIYRSQVPVTRYSWGQGTQVTVSS

SEQ ID NO: 2532 - protein, 119 aa, synthetic construct
EVQLVESGGGLVQAGGSLRLSCAASGIPSPLPAMGWYRQAPGKQRELVASISSVDNTRYAEFVKGRFTISRDNANQMVYLQMSSVKPEDTGVYYCNIYRSQVSSTRYSWGQGTQVTVSS

SEQ ID NO: 2533 - protein, 119 aa, synthetic construct
EVQLVESGGGLVQAGGSLRLSCAASGIPSPLPAMGWYRQAPGKQRELVASISSVDNTRYAEFVKGRFTISRDNANKMVYLQMSSVKPEDTGVYYCNIYRSQVSSTRYSWGQGTQVTVSS

SEQ ID NO: 2534 - protein, 117 aa, synthetic construct
EVQLVESGGGLVQAGGSLRLSCAASGMPLVAMGWYRQAPGKQRELVASISSGGNTGYAEFVKGRFTISRDNAKKMVYLQMNSVKPEDTGVYYCNIYRSQAPPTRYSWGQGTQVTVSS

SEQ ID NO: 2535 - protein, 119 aa, synthetic construct
EVQLVESGGGLVQAGGSLRLSCAAPGIPSPLPAMGWYRQAPGKQRELVASISSVDSTRYAEFVKGRFTISRDNANKMVYLQMSSVKPEDTGVYYCNIYRSQVSSTRYSWGQGTQVTVSS

SEQ ID NO: 2536 - protein, 119 aa, synthetic construct
EVQLVESGGGLVQAGGSLRLSCAASGIPFALPAMGWYRQAPGKQRELVASIGSGGDTRYAEFVKGRFTISRDNANKVVYLQMSSVKPEDTGVYYCNIYRSQIPTTRYSWGQGTQVTVSS

SEQ ID NO: 2537 - protein, 117 aa, synthetic construct
EVQLVESGGGLVQAGGSLRLSCAASGIPLYAMGWYRQAPGKQRELVASISSGGNTHYAEFVKGRFTISRDNANKMVYLEMRSVKPEDTGVYYCNIYRPRVPTTRYSWGQGTQVTVSS

SEQ ID NO: 2538 - protein, 119 aa, synthetic construct
EVQLVESGGGLVQAGGSLRLSCAASGIPFALAAMGWYRQAPGKQRELVASISSGGNTRYAEFVKGRFTISRDNANKMVYLQMSSVKPEDTGVYYCNIYRSKVPSTRYSWGQGTQVTVSS

SEQ ID NO: 2539 - protein, 117 aa, synthetic construct
EVQLVESGGGLVQAGGSLRLSCAASGMPFVAMGWYRQAPGKQRELVASISSGGNTHYAEFVKGRFTISRDNAKKMVYLQMSSVKPEDTGVYYCNIYRSQISPTRYSWGQGTQVTVSS

SEQ ID NO: 2540 - protein, 119 aa, synthetic construct
EVQLVESGGGLVQAGGSLRLSCAVSGIPSPLPAMGWYRQAPGKQRELVASISSGGNTRYAEFVKGRFTISRDNANKMVYLQMSSVKPEDTGVYYCNIYRSQRPSTRYSWGQGTQVTVSS

SEQ ID NO: 2541 - protein, 117 aa, synthetic construct
EVQLVESGGGLVQAGGSLRLSCAASGMPFVAMGWYRQAPGKQRELVASISSGGNTHYAEFVKGRFTISRDNAKKMVYLQVSSVKPEDTGVYYCNIYRSQISPTRYSWGQGTQVTVSS

SEQ ID NO: 2542 - protein, 119 aa, synthetic construct
EVQLVESGGGLVQAGGSLRLSCAASGIPFALPAMGWYRQAPGKQREVVASISSGGDTHYAEFVKGRFTISRDNANKMVYLQMSSVKPEDTGVYYCNIYRSHVPTTRYSWGQGTQVTVSS

SEQ ID NO: 2543 - protein, 119 aa, synthetic construct
EVQLVESGGGLVQAGGSLRLSCAASGIPSPLPAMGWYRQAPGEQRELVASISSGGNTRYAEFVKGRFTISRDNANKMVYLQMSSLKPEDTGVYYCNIYRSQVPSTRFAWGPGTQVTVSS

SEQ ID NO: 2544 - protein, 119 aa, synthetic construct
EVQLVESGGGLVQAGGSLRLSCATSGIPFALPAMGWYRQAPGKQRELVASISSGGNTNYAEFTKGRFTISRDNANKMVYLQMSSVEPEDTGVYYCNIYRSGVPSTRYSWGQGTQVTVSS

SEQ ID NO: 2545 - protein, 117 aa, synthetic construct
EVQLVESGGGLVQAGGSLRLSCAASGMPLTAMGWYRQAPGKQRELVASISSGGNTRYAEFVKGRFTISRDNANKMVFLQMSSVKPEDTGVYYCNIYRPQVPLTRYSWGQGTQVTVSS

SEQ ID NO: 2546 - protein, 119 aa, synthetic construct
EVQLVESGGGLVQTGGSLRLSCAASGMFLALTAMGWYRQAPGKQRELVASISSSSDTRYAEFVKGRFTISRDNAKNTVYLQMNSVKPEDTGVYYCNIYRSKVPPTRYSWGQGTQVTVSS

SEQ ID NO: 2547 - protein, 117 aa, synthetic construct
EVQLVESGGGLVQAGGSLRLSCAASGIPLYAMGWYRQAPGKQRELVASISSGGNTHYAEFVKGRFTISRDNANKMVYLEMSSVKPEDTGVYYCNIYRPKVPTTRYSWGQGTQVTVSS

SEQ ID NO: 2548 - protein, 117 aa, synthetic construct
EVQLVESGGGLVQAGGSLRLSCAASGIPLYAMGWYRQAPGKQRELVASISSGGNTHYAEFVKGRFTISRDNANKMVYLEMSSVKPEDTGVYYCNIYRPQVPSTRYSWGQGTQVTVSS

SEQ ID NO: 2549 - protein, 119 aa, synthetic construct
EVQLVESGGGLVQAGGSLRLSCAASGIPFALTAMGWYRQAPGKQRELVASISSAGNTHYAEFVEGRFTISRDVANKMVYLQMSSVKPEDTGVYYCNIYRSQVPSTRYSWGQGTQVTVSS

SEQ ID NO: 2550 - protein, 117 aa, synthetic construct
EVQLVESGGGLVQAGGSLRLSCAASGMPLVAMGWYRQAPGKQRELVASISSGGNTDYAEFVKGRFTISRDNAKKMVYLQMNSVKPEDTGVYYCNIYRPQVPPTRYSWGQGTQVTVSS

SEQ ID NO: 2551 - protein, 119 aa, synthetic construct
EVQLVESGGGLVQAGGSLRLSCAASGIPSPLPAMGWYRQAPGKQRELVASISSAGNTHYAEFVEGRFTISRDNANKMVYLQMSSVGPEDTGVYYCNIFRSQIPTTRYSWGQGTQVTVSS

SEQ ID NO: 2552 - protein, 119 aa, synthetic construct
EVQLVESGGGLVQAGGSLTLSCATSGLFFAQTAMGWYRQAPGKQRELVASISSSGQTRYAEAVKGRFSVSRDNAENTVYLQMRSVEPEDTGVYYCNIYRPQVPLTRYSWGQGTQVTVSS

SEQ ID NO: 2553 - protein, 119 aa, synthetic construct
EVQLVESGGGLVQAGGSLRLSCAAHGIPSPLPAMGWYRQAPGKQRELVASISSAGNTHYAEFVKGRFTISRDNANKMVYLQMSSVKPEDTGVYYCNIYRSQVPYTRYSWGQGTQVTVSS

SEQ ID NO: 2554 - protein, 119 aa, synthetic construct
EVQLVESGGGLVQAGGSLRLSCAASGIPFALPAMGWYRQAPGKQRELVASISSGGNTAYAEFVKGRFTISRDDANKMVYLHMSSVKPEDTGVYYCNIYRSQVPVTRYSWGQGTQVTVSS

SEQ ID NO: 2555 - protein, 117 aa, synthetic construct
EVQLVESGGGLVQAGGSLRLSCAASGMPLVAMGWYRQAPGKQRELVASISSGGNTGYAEFVKGRFTISRDNAKKMVYLQMNSVKPEDTSVYYCNIYRSQASPTRYSWGQGTQVTVSS

SEQ ID NO: 2556 - protein, 119 aa, synthetic construct
EVQLVESGGGLVQAGGSLRLSCAASGIPFALPAMGWYRQAPGKQRELVASISSGGNTTYAEFTKGRFTISRDNANKMVYLQMSSVKPEDTGVYYCNIYRSRVPTTRYSWGQGTQVTVSS

SEQ ID NO: 2557 - protein, 119 aa, synthetic construct
EVQLVESGGGLVQAGGSLRLSCAASGIPFALPAMGWYRQAPGKQRELVASISSGGNTTYGDFVKGRFTISRDDANKMLFLQMSSVKPEDTGVYYCNIYRSRVPTTRYSWGQGTQVTVSS

SEQ ID NO: 2558 - protein, 119 aa, synthetic construct
EVQLVESGGGLVQAGGSLRLSCAASGIPFALPAMGWYRQGPGKQRELVASISPGGNTSYAEFTKGRFTISRDNANKMVYLQMSSVKPEDTGVYYCNIYRSRVPSTRYSWGQGTQVTVSS

SEQ ID NO: 2559 - protein, 117 aa, synthetic construct
EVQLVESGGGLVQAGGSLRLSCAASGIPLVAMGWYRQAPGKQHELVASISSGGNTRYAEFVKGRFTISRDNANKMVYLQMSSVKPEDTGVYYCNIYRSEVPSTRYSWGQGTQVTVSS

SEQ ID NO: 2560 - protein, 127 aa, synthetic construct
EVQLLESGGGLVQPGGSLRLSCAASEFTLDYYAIGWFRQAPGKEREGVSCISTSGDSTNYADSVKGRFTISRDSAKNTVYLQMNSLRPEDTAVYYCAAYVYPDYYCSEYVLLRYDYWGQGTQVTVSS

SEQ ID NO: 2561 - protein, 127 aa, synthetic construct
EVQLLESGGGLVQPGGSLRLSCAASEFTLDYYAIGWFRQAPGKDREGVSCISRDGDSTNYADSVKGRFTISRDNAKNTVYLQMNSLRPEDTAVYYCAAYVYPDYYCSEYVLLKYDYWGQGTQVTVSS

SEQ ID NO: 2562 - protein, 127 aa, synthetic construct
EVQLLESGGGLVQPGGSLRLSCAASGFTLDYYAIGWFRQAPGKEREGVSCISRDGDSTNYADSVKGRFTISRDNAKNTVYLQMNSLRPEDTAVYYCAAYVYPDYYCSEYVPLKYDYWGQGTQVTVSS

SEQ ID NO: 2563 - protein, 127 aa, synthetic construct
EVQLLESGGGLVQPGGSLRLSCAASGFTLEYYAIGWFRQAPGKEREGVSCISSSGDSTNYADSVKGRFTISRDNAKNTVYLQMNSLRPEDTAVYYCAAYVYPDYYCSEYVLLKYDYWGQGTQVTVSS

SEQ ID NO: 2564 - protein, 127 aa, synthetic construct
EVQLLESGGGLVQPGGSLRLSCAASGFTLDYYGIGWFRQAPGKEREGVSCISSSGDSTNYADSVKGRFTISRDNAKNTVYLQMNSLRPEDTGVYYCAAYVYPDYYCSEYVLLRYDYWGQGTQVTVSS

SEQ ID NO: 2565 - protein, 127 aa, synthetic construct
EVQLLESGGGLVQPGGSLRLSCAASGFTLDYYAIGWFRQAPGKEREGVSCISSSGDSTNYADSVKGRFTISRDNAKNTVYLQMNSLRPEDTAVYYCAAYVYPDYYCSEYILSKYDYWGQGTQVTVSS

SEQ ID NO: 2566 - protein, 127 aa, synthetic construct
EVQLLESGGGLVQPGGSLRLSCAASEFTLDYYAIGWFRQAPGKEREGVSCISRDADNTNYADSVKGRFTISRDNAKNTVYLQMNSLRPEDTAVYYCAAYVYPDYYCSDYVLLKYDYWGQGTQVTVSS

SEQ ID NO: 2567 - protein, 127 aa, synthetic construct
EVQLLESGGGLVQPGGSLRLSCAASESTLDYYAIGWFRQAPGKEREGVSCISVSGDSTNYADSVKGRFTISRDNAKNTVYLQMNSLRPEDTAVYYCAAYVYPDYYCSEYVLLKYDYWGQGTQVTVSS

SEQ ID NO: 2568 - protein, 127 aa, synthetic construct
EVQLLESGGGLVQPGGSLRLSCAASGFTLDYYAIGWFRQAPGKEREGVSCISRDGDSTNYADSVKGRFTTSRDNAKNTVYLQMNSLRPEDTAVYYCAAYVYPDYYCSEYVLLKYDYWGQGTQVTVSS

SEQ ID NO: 2569 - protein, 127 aa, synthetic construct
EVQLLESGGGLVQPGGSLRLSCAASEFTLDYYAVGWFRQAPGKEREGVSCISSSGDATDYADSVKGRFTISRDNAKNTVYLQMNSLRFEDTAVYYCAAYVYPDYYCSEYVLLKYDYWGQGTQVTVSS

SEQ ID NO: 2570 - protein, 127 aa, synthetic construct
EVQLLESGGGLVQPGGSLRLSCAAPGFTLDYYAIGWFRQAPGKEREGVSCISSSGDSTNYADSVKGRFTISRDNAKNTVYLQMNSLRPEDTAVYYCAAYVYPDYYCSEYVLLKYDYWGQGTQVTVSS

SEQ ID NO: 2571 - protein, 127 aa, synthetic construct
EVQLLESGGGLVQPGGSLRLSCAASGFTLDYYAIGWFRQAPGKEREGVSCISRDGDSTNYADSVKGRFTISRDNAKNTVYLQMNSLRPEDTAVYYCAAYVYPDYYCSEYVLLKYDYWSQGTQVTVSS

SEQ ID NO: 2572 - protein, 127 aa, synthetic construct
EVQLLESGGGLVQPGGSLRLSCAASGFTLDYYSIGWFRQAPGKEREGVSCISSSGDSTNYADSVKGRFTISRDNAKNTVYLQMNSLRPEDTAVYYCAAYVYPDYYCSEYVKLKYDYWGQGTQVTVSS

SEQ ID NO: 2573 - protein, 127 aa, synthetic construct
EVQLLESGGGLVQPGGSLRLSCAASEFTLDYYAIGWFRQAPGKEREGVSCISTSGDSTNYADSVKGRFTISRDNAKNTVYLQMNSLRPEDTAVYYCAAYVYPDYYCSDYVLLKYDYWGQGTQVTVSS

SEQ ID NO: 2574 - protein, 127 aa, synthetic construct
EVQLLESGGGLVQPGGSLRLSCAGSDVTLDYYAIGWFRQAPGKEREGVSCISSSGDSTNYADSVKGRFTISRDSAKNTVYLQMNSLRPEDTAVYYCAAYVYPDYYCSEYVLLKYDYWGQGTQVTVSS

SEQ ID NO: 2575 - protein, 127 aa, synthetic construct
EVQLLESGGGLVQPGGSLRLSCAASGFTLDYYAIGWFRQAPGKEREGVSCISSSGDSTNYADSVKGRFTISRDNAKNTVYLQMNSLRPEDTAVYYCAAYVYPDYYCSEYVLLKYDYWGQGTQVTVSS

SEQ ID NO: 2576 - protein, 127 aa, synthetic construct
EVQLLESGGGLVQPGGSLRLSCAASGFTLDYYSIGWFRQAPGKEREGVSCISSSGDSTNYADSVKGRFTISRDSAKNTVYLQMNSLRPEDTAVYYCAAYVYPDYYCSEYVLLKYDYWGQGTQVTVSS

SEQ ID NO: 2577 - protein, 127 aa, synthetic construct
EVQLLESGGGLVQPGGSLRLSCAASGFPLGYYSIGWFRQAPGKEREGVSCISSSGDSTNYADSVKGRFTISRDNAKNTVYLQMNSLRPEDTAVYYCAAYVYPDYYCSEYVLLKYDYWGQGTQVTVSS

SEQ ID NO: 2578 - protein, 127 aa, synthetic construct
EVQLLESGGGLVQPGGSLRLSCAASGFTLGYYSIGWFRQAPGKEREGVSCISSSGDSTNYADSVKGRFTISRDNAKNTVYLQMNSLRPEDTAVYYCAAYVYPDYYCSEYVKLKYDYWGQGTQVTVSS

SEQ ID NO: 2579 - protein, 127 aa, synthetic construct
EVQLLESGGGLVQPGGSLRLSCAASGFTLDYYAIGWFRQAPGKEREGVSCISRDGDSTNYADSVKGRFTISRDNAKNTVYLQMNSLRSEDTAVYYCAAYVYPDYYCSEYVLLKYDYWGQGTQVTVSS

SEQ ID NO: 2580 - protein, 127 aa, synthetic construct
EVQLLESGGGLVQPGGSLRLSCAASEFTLDYYAIGWFRQAPGKEREGISCISSSGDVTHYADSVKGRFTISRDNAKNTVYLQMNSLRPEDTAVYYCAAYVYPDYYCSEYVLLKYDYWGQGTQVTVSS

SEQ ID NO: 2581 - protein, 127 aa, synthetic construct
EVQLLESGGGLVQPGGSLRLSCAASGFTLDYYAIGWFRQAPGKEREGVSCISSSGDSTNYADSVKGRFTISRDNAKNTVYLQMNSLRPEDTAVYYCAAYVYPDYYCSEYILLKYDYWGQGTQVTVSS

SEQ ID NO: 2582 - protein, 127 aa, synthetic construct
EVQLLESGGGLVQPGGSLRLSCAASGFALDYYAIGWFRQAPGKEREGVSCISSSGDSTNYADSVKGRFTISRDSAKNTVYLQMNSLRPEDTAVYYCAAYVYPDYYCSEYVLLKYDYWGQGTQVTVSS

SEQ ID NO: 2583 - protein, 127 aa, synthetic construct
EVQLLESGGGLVQPGGSLRLSCAASGFTLDYYAIGWFRQAPGKEREGVSCISSSGGSTNYADSVKGRFTISRDNAKNTVYLQMNSLRPEDTAVYYCAAYVYPDYYCSEYVKLKYDYWGQGTQVTVSS

SEQ ID NO: 2584 - protein, 127 aa, synthetic construct
EVQLLESGGGLVQPGGSLRLSCAASGFTLDYYAIGWFRQAPGKEREGVSCISSSGDSTNYADSVKGRFTISRDNAKNTVYLQMNSLRPEDTAVYYCAAYVYPDYYCSEYVKLKYDYWGQGTQVTVSS

SEQ ID NO: 2585 - protein, 127 aa, synthetic construct
EVQLLESGGGLVQPGGSLRLSCAASGFTLDYYAIGWFRQAPGKEREGVSCISSSGDSTNYADSVKGRFTISRDNAKNTVYLQMNSLRPEDTAVYYCAAYVYPDYYCSDYVLLKYDYWGQGTQVTVSS

SEQ ID NO: 2586 - protein, 127 aa, synthetic construct
EVQLLESGGGLVQPGGSLRLSCAASGFTLDYYAIGWFRQAPGKEREGVSCISSSGGSTNYADSVKGRFTISRDNAKNTVYLQMNSLRPEDTAVYYCAAYVYPDYYCSDYVLLKYDYWGQGTQVTVSS

SEQ ID NO: 2587 - protein, 127 aa, synthetic construct
EVQLLESGGGLVQPGGSLRLSCAASGFTLDYYAIGWFRQAPGKEREGVSCISSSGGSTNYADSVKGRFTISRDNAKNTVYLQMNSLRPEDTAVYYCAAYVYPDYYCSDYDLLRYDYWGQGTQVTVSS

SEQ ID NO: 2588 - protein, 127 aa, synthetic construct
EVQLLESGGGLVQPGGSLRLSCAASGFTLDYYAIGWFRQAPGKEREGVSCISSSGGNTNYADSVKGRFTISRDNAKNTVYLQMNSLRPEDTAVYYCAAYVYPDYYCSDYVLLKYDYWGQGTQVTVSS

SEQ ID NO: 2589 - protein, 127 aa, synthetic construct
EVQLLESGGGLVQPGGSLRLSCAASGFTLDYYAIGWFRQAPGKEREGVSCISSSGGSTNYADSVKGRSTISRDNAKNTVYLQMNSLRPEDTAVYYCAAYVYPDYYCSDYDLLRYDYWGQGTQVTVSS

SEQ ID NO: 2590 - protein, 127 aa, synthetic construct
EVQLLESGGGLVQPGGSLRLSCAASGFTLDYYAIGWFRQAPGKEREGVSCISSSGDSTNYADSVKGRFTISRDNAKNTVYLQMNSLRPEDTAVYYCAAYVYPDYYCSGYVLLEYDYWGQGTQVTVSS

SEQ ID NO: 2591 - protein, 127 aa, synthetic construct
EVQLLESGGGLVQPGGSLRLSCAASGFTLDYYGIGWFRQAPGKEREGVSCISSSGDSTNYADSVKGRFTISRDNAKNTVYLQMNSLRPEDTAVYYCAAYVYPDYYCSGYVLLEYDYWGQGTQVTVSS

SEQ ID NO: 2592 - protein, 127 aa, synthetic construct
EVQLLESGGGLVQPGGSLRLSCAASGFTLDYYAIGWFRQAPGKEREGVACISSSGDSTNYADSVKGRFTISRDNAKNTVYLQMNSLRPEDTAVYYCAAYVYPDYYCSEYVLSKYDYWGQGTQVTVSS

SEQ ID NO: 2593 - protein, 127 aa, synthetic construct
EVQLLESGGGLAQPGGSLRLSCAASGFTLDYYSIGWFRQAPGKEREGVSCISSSGDSTNYADSVKGRFTISRDNAKNTVYLQMNSLRPEDTAVYYCAAYVYPDYYCSGYVLLEYDYWGQGTQVTVSS

SEQ ID NO: 2594 - protein, 127 aa, synthetic construct
EVQLLESGGGLVQPGGSLRLSCAASGFTLDYYAIGWFRQAPGKEREGVSCISSSGGSTNYADSVKGRFTISRDNAKNTVYLQMNSLRPEDTAVYYCAAYVYPDYYCSDYVLSRYDYWGQGTQVTVSS

SEQ ID NO: 2595 - protein, 127 aa, synthetic construct
EVQLLESGGGLVQPGGSLRLSCAASGFTLDYYAIGWFRQAPGKEREGVSCISSSGGSTNYADSVKGRFTISRDNAKNTVYLQMNSLRPEDTAVYYCAAYVYPDYYCSEYVLLRYDYWGQGTQVTVSS

SEQ ID NO: 2596 - protein, 127 aa, synthetic construct
EVQLLESGGGLVQPGGSLRLSCAASGFTLDYYAIGWFRQAPGKEREGVSCISSSGGSTNYADSVKGRFTISRDNAKNTVYLQMNSLRPEDTAVYYCAAYVYPDYYCSDYVLLRYDYWGQGTQVTVSS

SEQ ID NO: 2597 - protein, 127 aa, synthetic construct
EVQLLESGGGLVQPGGSLRLSCAASGFTLDYYAIGWFRQAPGKEREGVSCISTSGDSTNYADSVKGRFTISRDNAKNTVYLQMNSLRPEDTAVYYCAAYVYPDYYCSDYVLSRYDYWGQGTQVTVSS

SEQ ID NO: 2598 - protein, 127 aa, synthetic construct
EVQLLESGGGLVQPGGSLRLSCAASGFTLDYYAIGWFRQAPGKEREGVSCISRDGGSTNYADSVKGRFTISRDNAKNTVYLQMNSLRPEDTAVYYCAAYVYPDYYCSEYVLLRYDYWGQGTQVTVSS

SEQ ID NO: 2599 - protein, 127 aa, synthetic construct
EVQLLESGGGLVQPGGSLRLSCAASGFTLDYYAIGWFRQAPGKEREGVSCISSSGGSTNYADSVKGRFTISRDTAKNTVYLQMNSLRPEDTAVYYCAAYVYPDYYCSDYDLLRYDYWGQGTQVTVSS

SEQ ID NO: 2600 - protein, 127 aa, synthetic construct
EVQLLESGGGLVQPGGSLRLSCAASGFTLDYYAIGWFRQAPGKEREGVSCISSSGGSTNYADSVKGRFTISRDNAKNTVYLQMNSLRPEDTAVYYCAAYVYPDYYCSDYVPLRYDYWGQGTQVTVSS

SEQ ID NO: 2601 - protein, 127 aa, synthetic construct
EVQLLESGGGLVQPGGSLRLSCAASGFTLDYYAIGWFRQAPGKEREGVSCISTSGDSTNYADSVKGRFTISRDNAKNTVYLQMNSLRPEDTAVYYCAAYVYPDYYCSDYVPLRYDYWGQGTQVTVSS

SEQ ID NO: 2602 - protein, 127 aa, synthetic construct
EVQLLESGGGLVQPGGSLRLSCAASGFTLDYYAIGWFRQAPGKEREGVSCISSSGGSTNYADSVKGRFTISRDNAKNTVYLQMNSLRPEDTAVYYCAAYVYPEYYCSEYVPLRYDYWGQGTQVTVSS

SEQ ID NO: 2603 - protein, 127 aa, synthetic construct
EVQLLESGGGLVQPGGSLRLSCAASGFTLDYYAIGWFRQAPGKEREGVSCISSSGDSTNYADSVKGRFTISRDNAKNTVYLQMNSLRPEDTAVYYCAAYVYPDYYCSEYALLKYDYWGQGTQVTVSS

SEQ ID NO: 2604 - protein, 127 aa, synthetic construct
EVQLLESGGGLVQPGGSLRLSCAASGFTLDYYAIGWFRQAPGKEREGVSCISSSGGSTNYADSVKGRFTISRDNAKNTVYLQMNSLRPEDTAVYYCAAYVDPDYYCSEYVLLKYDYWGQGTQVTVSS

SEQ ID NO: 2605 - protein, 127 aa, synthetic construct
EVQLLESGGGLVQPGGSLRLSCAASGFTLDYYAIGWFRQAPGKEREGVSCISSSGGSTNYADSVKGRFTISRDNAKNTVYLQMNSLRPEDTAVYYCAAYDYPDYYCSEYVLLKYDYWGQGTQVTVSS

SEQ ID NO: 2606 - protein, 127 aa, synthetic construct
EVQLLESGGGLVQPGGSLRLSCAASGFTLDYYAIGWFRQAPGKEREGVSCISSSGGSTNYADSVKGRFTISRDNAKNTVYLQMNSLRPEDTAVYYCAAYVYPDDYCSEYVLLKYDYWGQGTQVTVSS

SEQ ID NO: 2607 - protein, 127 aa, synthetic construct
EVQLLESGGGLVQPGGSLRLSCAASGFTLDYYAIGWFRQAPGKEREGVSCISSSGGSTNYADSVKGRFTISRDNAKNTVYLQMNSLRPEDTAVYYCAAYVYPDYDCSEYVLLKYDYWGQGTQVTVSS

SEQ ID NO: 2608 - protein, 127 aa, synthetic construct
EVQLLESGGGLVQPGGSLRLSCAASGFTLDYYAIGWFRQAPGKEREGVSCISSSGGSTNYADSVKGRFTISRDNAKNTVYLQMNSLRPEDTAVYYCAAYVYPDYYCSEYALLKYDYWGQGTQVTVSS

SEQ ID NO: 2609 - protein, 127 aa, synthetic construct
EVQLLESGGGLVQPGGSLRLSCAASGFTLDYYAIGWFRQAPGKEREGVSCISSSGDSTNYADSVKGRFTISRDNAKNTVYLQMNSLRPEDTAVYYCAAYVYPDYYCSDYVLSRYDYWGQGTQVTVSS

SEQ ID NO: 2610 - protein, 127 aa, synthetic construct
EVQLLESGGGLVQPGGSLRLSCAASGFTLDYYAIGWFRQAPGKEREGVSCISSSGGSTNYADSVKGRFTISRDNAKNTVYLQMNSLRPEDTAVYYCAAYVYPDYYCSEYALFRYDYWGQGTQVTVSS

SEQ ID NO: 2611 - protein, 127 aa, synthetic construct
EVQLLESGGGLVQPGGSLRLSCAASGFTLDYYAIGWFRQAPGKEREGVSCISSSGGSTNYADSVKGRFTISRDNAKNTVYLQMNSLRPEDTAVYYCAAYVYPDYFCSEYDLLRYDYWGQGTQVTVSS

SEQ ID NO: 2612 - protein, 127 aa, synthetic construct
EVQLLESGGGLVQPGGSLRLSCAASGFTLDYYAIGWFRQAPGKEREGVSCISSSGGSTNYADSVKGRFTISRDNAKNTVYLQMNSLRPEDTAVYYCAAYVYPDHYCSEYVLLKYDYWGQGTQVTVSS

SEQ ID NO: 2613 - protein, 127 aa, synthetic construct
EVQLLESGGGLVQPGGSLRLSCAASGFTLDYYAIGWFRQAPGKEREGVSCISSSGGSTNYADSVKGRFTISRDNAKNTVYLQMNSLRPEDTAVYYCAAYVYPEYYCSEYVLLKYDYWGQGTQVTVSS

SEQ ID NO: 2614 - protein, 127 aa, synthetic construct
EVQLLESGGGLVQPGGSLRLSCAASGFTLDYYAIGWFRQAPGKEREGVSCISSSGGSTNYADSVKGRFTISRDNAKNTVYLQMNSLRPEDTAVYYCAAYVYPDYYCSEYALSRYDYWGQGTQVTVSS

SEQ ID NO: 2615 - protein, 131 aa, synthetic construct
EVQLLESGGGLVQPGGSLRLSCAASGFTLDYYAIGWFRQAPGKEREGVSCIRTEISSTGDTTNYADSVKGRFTISRDNAKNTVYLQMNSLRPEDTAVYYCAAYVYPDYYCSEYVLSRYDHWGQGTQVTVSS

SEQ ID NO: 2616 - protein, 127 aa, synthetic construct
EVQLLESGGGLVQPGGSLRLSCAASGFTLDYYAIGWFRQAPGKEREGVSCISSSGGSTNYADSVKGRFTISRDNAKNTVYLQMNSLRPEDTAVYYCAAYVYPDDYCSEYVPLRYDYWGQGTQVTVSS

SEQ ID NO: 2617 - protein, 127 aa, synthetic construct
EVQLLESGGGLVQPGGSLRLSCAASGFTLDYYAIGWFRQAPGKEREGVSCISSSGGSTNYADSVKGRFTISRDNAKNTVYLQMNSLRPEDTAVYYCAASVYPDYYCSEYVLLKYDYWGQGTQVTVSS

SEQ ID NO: 2618 - protein, 127 aa, synthetic construct
EVQLLESGGGLVQPGGSLRLSCAASGFTLDYYAIGWFRQAPGKEREGVSCISSSGGSTNYADSVKGRFTISRDNAKNTVYLQMNSLRPEDTAVYYCAAYVYPDYYCSEYVLSKYDYWGQGTQVTVSS

SEQ ID NO: 2619 - protein, 127 aa, synthetic construct
EVQLLESGGGLVQPGGSLRLSCAASGFIMDYYAIGWFRQAPGKEREGVSCISSSGDSTNYADSVKGRFTISRDNAKNTVYLQMNSLRPEDTAVYYCAAYVYPDHYCSEYVLLKYDYWGQGTQVTVSS

SEQ ID NO: 2620 - protein, 127 aa, synthetic construct
EVQLLESGGGLVQPGGSLRLSCAASGFTLDYYAIGWFRQAPGKEREGVSCISSSGDSTNYADSVKGRFTISRDNAKNTVYLQMNSLRPEDTAVYYCAAYVYPDYYCSEYVLSKYDYWGQGTQVTVSS

SEQ ID NO: 2621 - protein, 127 aa, synthetic construct
EVQLLESGGGLVQPGGSLRLSCAASGFTLDYYAIGWFRQAPGKEREGVSCISSSGGSTNYADSVKGRFTISRDNAKNTVYLQMNSLRPEDTAVYYCAAYVYPDYYCPEYVLSRYDYWGQGTQVTVSS

SEQ ID NO: 2622 - protein, 127 aa, synthetic construct
EVQLLESGGGLAQPGGSLRLSCAASGFTLDYYAIGWFRQAPGKEREGVSCISSSGGSTNYADSVKGRFTISRDNAKNTVYLQMNSLRPEDTAVYYCAAYVYPDYYCSDYDLLRYDYWGQGTQVTVSS

SEQ ID NO: 2623 - protein, 127 aa, synthetic construct
EVQLLESGGGLVQPGGSLRLSCAASGFTLDYYAIGWFRQAPGKEREGVSCISSSGGSTNYADSVKGRFTISRDNAKNTVYLQMNSLRPEDTAVYYCAAYAYPDYYCSEYVLLKYDYWGQGTQVTVSS

SEQ ID NO: 2624 - protein, 127 aa, synthetic construct
EVQLLESGGGLVQPGGSLRLSCAASGFTLDYYAIGWFRQAPGKEREGVSCISSSGGSTNYADSVKGRFTISRDNAKNTVYLQMNSLRPEDTAVYYCAAYVSPDYYCSEYVLLKYDYWGQGTQVTVSS

SEQ ID NO: 2625 - protein, 127 aa, synthetic construct
EVQLLESGGGLVQPGGSLRLSCAASGFTLDYYAIGWFRQAPGKEREGVSCISSSGGNTNYADSVKGRFTISRDNAKNTVYLQMNSLRPEDTAVYYCAAYAYPDYYCSDYVLFKYDYWGQGTQVTVSS

SEQ ID NO: 2626 - protein, 127 aa, synthetic construct
EVQLLESGGGLVQPGGSLRLSCAASGFTLDYYAIGWFRQAPGKEREGVSCISSSGGSTNYADSVKGRFTISRDNAKNTVYLQMNSLRPEDTAVYYCAAYVYPDYYCSEYIPLRYDYWGQGTQVTVSS

SEQ ID NO: 2627 - protein, 127 aa, synthetic construct
EVQLLESGGGLVQPGGSLRLSCAASGFTLDYYAIGWFRQAPGKEREGVSCISSSGGSTNYADSVKGRFTISRDNAKNTVYLQMNSLRPEDTAVYYCAAYVYPDYYCSEYVLIKYDYWGQGTQVTVSS

SEQ ID NO: 2628 - protein, 127 aa, synthetic construct
EVQLLESGGGLVQPGGSLRLSCAASGFTLDYYAIGWFRQAPGKEREGVSCISSSGGSTNYADSVKGRFTISRDNAKNTVYLQMNSLRPEDTAVYYCAAYVYPYYYCSEYVLLKYDYWGQGTQVTVSS

SEQ ID NO: 2629 - protein, 127 aa, synthetic construct
EVQLLESGGGLVQPGGSLRLSCAASGFTLDYYAIGWFRQAPGKEREGVSCISSSGGSTNYADSVKGRFTISRDNAKNTVYLQMNSLRPEDTAVYYCAASVYPDYYCSDYVLLRYDYWGQGTQVTVSS

SEQ ID NO: 2630 - protein, 127 aa, synthetic construct
EVQLLESGGGLVQPGGSLRLSCAASGFIMDYYAIGWFRQAPGKEREGVSCISSSGDSTNYADSVKGRFTISRDNAKNTVYLQMNSLRPEDTAVYYCAAYVYPDYYCSEYVLLKYDHWGQGTQVTVSS

SEQ ID NO: 2631 - protein, 127 aa, synthetic construct
EVQLLESGGGLVQPGGSLRLSCAASGFTLDYYAIGWFRQAPGKEREGVSCISSSGGSTNYADSVKGRFTISRDNAKNTVYLQMNSLRPEDTAVYYCAAYVYPDYYCTEYVLLKYDYWGQGTQVTVSS

SEQ ID NO: 2632 - protein, 127 aa, synthetic construct
EVQLLESGGGLVQPGGSLRLSCAASGFTLDYYAIGWFRQAPGKEREGVSCISSSGDSTNYADSVKGRFTISRDNAKNTVYLQMNSLRPEDTAVYYCAAYVYSDYYCSDYVLLRYDYWGQGTQVTVSS

SEQ ID NO: 2633 - protein, 127 aa, synthetic construct
EVQLLESGGGLVQPGGSLRLSCAASGFTLDYYAIGWFRQAPGKEREGVSCISSSGGSTNYADSVKGRFTISRDNAKNTVYLQMNSLRPEDTAVYYCAAYVYPEYYCSEYVLSRYDYWGQGTQVTVSS

SEQ ID NO: 2634 - protein, 127 aa, synthetic construct
EVQLLESGGGLVQPGGSLRLSCAASGFTLDYYAIGWFRQAPGKEREGVSCISRDGGSTNYADSVKGRFTISRDNAKNTVYLQMNSLRPEDTAVYYCAAYVYPDYYCTEYVQLRYDYWGQGTQVTVSS

SEQ ID NO: 2635 - protein, 127 aa, synthetic construct
EVQLLESGGGLVQPGGSLRLSCAASGFTLDYYAIGWFRQAPGKEREGVSCISTSGDSTNYADSVKGRFTISRDNAKNTVYLQMNSLRPEDTAVYYCAAYVYPDYYCSDYVQLRYDYWGQGTQVTVSS

SEQ ID NO: 2636 - protein, 127 aa, synthetic construct
EVQLLESGGGLVQPGGSLRLSCAASGFTLDYYAIGWFRQAPGKEREGVSCISSSGGSTNYADSVKGRFTISRDNAKNTVYLQMNSLRPEDTAVYYCAAYVDPDYYCSEYVPLRYDYWGQGTQVTVSS

SEQ ID NO: 2637 - protein, 127 aa, synthetic construct
EVQLLESGGGLVQPGGSLRLSCAASGFTLDYYAIGWFRQAPGKEREGVSCISSSGGSTNYADSVKGRFTISRDNAKNTVYLQMNSLRPEDTAVYYCAAYVYTDYYCSDYVLLRYDYWGQGTQVTVSS

SEQ ID NO: 2638 - protein, 127 aa, synthetic construct
EVQLLESGGGLVQPGGSLRLSCAASGFTLDYYAIGWFRQAPGKEREGVSCISSSGGSTNYADSVKGRFTISRDNAKNTVYLQMNSLRPEDTAVYYCAAYVYPDYYCSEYVLLKYAYWGQGTQVTVSS

SEQ ID NO: 2639 - protein, 127 aa, synthetic construct
EVQLLESGGGLVQPGGSLRLSCAASGFTLDYYAIGWFRQAPGKEREGVSCISSSGGSTNYADSVKGRFTISRDNAKNTVYLQMNSLRPEDTAVYYCAAYVYPDYYCSEYVLLKYDHWGQGTQVTVSS

SEQ ID NO: 2640 - protein, 127 aa, synthetic construct
EVQLLESGGGLVQPGGSLRLSCAASGFTLDYYAIGWFRQAPGKEREGVSCISSSGGSTNYADSVKGRFTISRDNAKNTVYLQMNSLRPEDTAVYYCAAYVYSDYYCSEYVLSRYDYWGQGTQVTVSS

SEQ ID NO: 2641 - protein, 127 aa, synthetic construct
EVQLLESGGGLVQPGGSLRLSCAASGFTLDYYAIGWFRQAPGKEREGVSCISSSGGNTNYADSVKGRFTISRDNAKNTVYLQMNSLRPEDTAVYYCATYVYPDYYCSDYVLSKYDYWGQGTQVTVSS

SEQ ID NO: 2642 - protein, 127 aa, synthetic construct
EVQLLESGGGLVQPGGSLRLSCAASGFTLDYYAIGWFRQAPGKEREGVSCISSSGGSTNYADSVKGRFTISRDNAKNTVYLQMNSLRPEDTAVYYCAAYVYPEYYCSDYVLLRYDYWGQGTQVTVSS

SEQ ID NO: 2643 - protein, 127 aa, synthetic construct
EVQLLESGGGLVQPGGSLRLSCAASGFTLDYYAIGWFRQAPGKEREGVSCISSSGDSTNYADSVKGRFTISRDNAKNTVYLQMNSLRPEDTAVYYCAVYVYPDYYCSEYVLLKYDYWGQGTQVTVSS

SEQ ID NO: 2644 - protein, 127 aa, synthetic construct
EVQLLESGGGLVQPGGSLRLSCAASGFIMDYYAIGWFRQAPGKEREGVSCISSSGDSTNYADSVKGRFTISRDNAKNTVYLQMNSLRPEDTAVYYCAAYVYPEYYCSEYVLLKYDYWGQGTQVTVSS

SEQ ID NO: 2645 - protein, 131 aa, synthetic construct
EVQLLESGGGLVQPGGSLRLSCAASGFTLDYYAIGWFRQAPGKEREGVSCIRTEISSTGDTTNYADSVKGRFTISRDNAKNTVYLQMNSLRPEDTAVYYCAAYVYPEYYCSEYVLSRYDYWGQGTQVTVSS

SEQ ID NO: 2646 - protein, 127 aa, synthetic construct
EVQLLESGGGLVQPGGSLRLSCAASGFTLDYYAIGWFRQAPGKEREGVSCISSSGDSTNYADSVKGRFTISRDNAKNTVYLQMNSLRPEDTAVYYCAAYVYPEYYCSEYVLLKYDYWGQGTQVTVSS

SEQ ID NO: 2647 - protein, 127 aa, synthetic construct
EVQLLESGGGLVQPGGSLRLSCAASGFTLDYYAIGWFRQAPGKEREGVSCISSSGDSTNYADSVKGRFTISRDNAKNTVYLQMNSLRPEDTAVYYCAAYVDPDYYCSEYVLLKYDYWGQGTQVTVSS

SEQ ID NO: 2648 - protein, 127 aa, synthetic construct
EVQLLESGGGLVQPGGSLRLSCAASGFTLDYYAIGWFRQAPGKEREGVSCISSSGGSTNYADSVKGRFTISRDNAKNTVYLQMNSLRPEDTAVYYCAAYVYPDYYCSDYDLSRYDHWGQGTQVTVSS

SEQ ID NO: 2649 - protein, 127 aa, synthetic construct
EVQLLESGGGLVQPGGSLRLSCAASGFTLDYYAIGWFRQAPGKEREGVSCISRDGGSTNYADSVKGRFTISRDNAKNTVYLQMNSLRPEDTAVYYCAAYVYPDNYCSEYILLRYDYWGQGTQVTVSS

SEQ ID NO: 2650 - protein, 127 aa, synthetic construct
EVQLLESGGGLVQPGGSLRLSCAASGFTLDYYAIGWFRQAPGKEREGVSCISSSGGSTNYADSVKGRFTISRDNAKNTVYLQMNSLRPEDTAVYYCAAYVYPDFYCSEYVPLRYDYWGQGTQVTVSS

SEQ ID NO: 2651 - protein, 127 aa, synthetic construct
EVQLLESGGGLVQPGGSLRLSCAASGFTLDYYAIGWFRQAPGKEREGVSCISSSGGSTNYADSVKGRFTISRDNAKNTVYLQMNSLRPEDTAVYYCAAYVYPDDYCSEYVLSRYDYWGQGTQVTVSS

SEQ ID NO: 2652 - protein, 127 aa, synthetic construct
EVQLLESGGGLVQPGGSLRLSCAASGFTLDYYAIGWFRQAPGKEREGVSCISTSGDSTNYADSVKGRFTISRDNAKNTVYLQMNSLRPEDTAVYYCAAYVYPDYYCSDYVLLRHDYWGQGTQVTVSS

SEQ ID NO: 2653 - protein, 127 aa, synthetic construct
EVQLLESGGGLVQPGGSLRLSCAASGFTLDYYAIGWFRQAPGKEREGVSCISSSGGSTNYADSVKGRFTISRDNAKNTVYLQMNSLRPEDTAVYYCAAYVYPDYYCSDYVLLRHDYWGQGTQVTVSS

SEQ ID NO: 2654 - protein, 127 aa, synthetic construct
EVQLLESGGGLVQPGGSLRLSCAASGFTLDYYAIGWFRQAPGKEREGVSCISSSGGSTNYADSVKGRFTISRDNAKNTVYLQMNSLRPEDTAVYYCAAFVYPDYYCSDYVLLRYDYWGQGTQVTVSS

SEQ ID NO: 2655 - protein, 127 aa, synthetic construct
EVQLLESGGGLVQPGGSLRLSCAASGFTLDYYAIGWFRQAPGKEREGVSCISSSGGSTNYADSVKGRFTISRDNAKNTVYLQMNSLRPEDTAVYYCAAYVYPDDSCSEYVLLRYDYWGQGTQVTVSS

SEQ ID NO: 2656 - protein, 127 aa, synthetic construct
EVQLLESGGGLVQPGGSLRLSCAASGFTLDYYAIGWFRQAPGKEREGVSCISSSGDSTNYADSVKGRFTISRDNAKNTVYLQMNSLRPEDTAVYYCAAYVYPDYYCSDYVLLRHDYWGQGTQVTVSS

SEQ ID NO: 2657 - protein, 127 aa, synthetic construct
EVQLLESGGGLVQPGGSLRLSCAASGFTLDYYAIGWFRQAPGKEREGVSCISSSGGSTNYADSVKGRFTISRDNAKNTVYLQMNSLRPEDTAVYYCAAYVYHDYYCSDYVLLRYDYWGQGTQVTVSS

SEQ ID NO: 2658 - protein, 127 aa, synthetic construct
EVQLLESGGGLVQPGGSLRLSCAASGFTLDYYAIGWFRQAPGKEREGVSCISSSGGSTNYADSVKGRFTISRDNAKNTVYLQMNSLRPEDTAVYYCAAYVDPDYYCSDYVLLRYDYWGQGTQVTVSS

SEQ ID NO: 2659 - protein, 131 aa, synthetic construct
EVQLLESGGGLVQPGGSLRLSCAASGFTLDYYAIGWFRQAPGKEREGVSCIRTEISSTGDTTNYADSVKGRFTISRDNAKNTVYLQMNSLRPEDTAVYYCAAYVYPDYYCSEYALSRYDYWGQGTQVTVSS

SEQ ID NO: 2660 - protein, 127 aa, synthetic construct
EVQLLESGGGLVQPGGSLRLSCAASGFTLDYYAIGWFRQAPGKEREGVSCISSSGGRTNYADSVKGRFTISRDNAKNTVYLQMNSLRPEDTAVYYCAAYIYPDYYCSEYDLLRYDYWGQGTQVTVSS

SEQ ID NO: 2661 - protein, 127 aa, synthetic construct
EVQLLESGGGLVQPGGSLRLSCAASGFTLDYYAIGWFRQAPGKEREGVSCISSSGGSTNYADSVKGRFTISRDNAKNTVYLQMNSLRPEDTAVYYCAADVYPDYYCSDYVLLRYDYWGQGTQVTVSS

SEQ ID NO: 2662 - protein, 127 aa, synthetic construct
EVQLLESGGGLVQPGGSLRLSCAASGFTLDYYAIGWFRQAPGKEREGVSCISSSGGSTNYADSVKGRFTISRDNAKNTVYLQMNSLRPEDTAVYYCASYVYPDYYCSEYVLLKYDYWGQGTQVTVSS

SEQ ID NO: 2663 - protein, 127 aa, synthetic construct
EVQLLESGGGLVQPGGSLRLSCAASGFTLDYYAIGWFRQAPGKEREGVSCISSSGGSTNYADSVKGRFTISRDNAKNTVYLQMNSLRPEDTAVYYCAAYVYPDDYCSESVLLRYDYWGQGTQVTVSS

SEQ ID NO: 2664 - protein, 127 aa, synthetic construct
EVQLLESGGGLVQPGGSLRLSCAASGFTLDYYAIGWFRQAPGKEREGVSCISSSGGSTNYADSVKGRFTISRDNAKNTVYLQMNSLRPEDTAVYYCAAYVYPDDYCSDYVLLRYDYWGQGTQVTVSS

SEQ ID NO: 2665 - protein, 127 aa, synthetic construct
EVQLLESGGGLVQPGGSLRLSCAASGFTLDYYAIGWFRQAPGKEREGVSCISSSGGSTNYADSVKGRFTISRDNAKNTVYLQMNSLRPEDTAVYYCAAYDYPDYYCSDYVLLRYDYWGQGTQVTVSS

SEQ ID NO: 2666 - protein, 127 aa, synthetic construct
EVQLLESGGGLVQPGGSLRLSCAASGFTLDYYAIGWFRQAPGKEREGVACISSSGDSTNYADSVKGRFTISRDNAKNTVYLQMNSLRPEDTAVYYCAAYVYPDYYCLEYVLLKYDYWGQGTQVTVSS

SEQ ID NO: 2667 - protein, 127 aa, synthetic construct
EVQLLESGGGLVQPGGSLRLSCAASGFTLDYYAIGWFRQAPGKEREGVSCISSSGDSTNYADSVKGRFTISRDNAKNTVYLQMNSLRPEDTAVYYCAASVYPDYYCSEYVLLKYDYWGQGTQVTVSS

SEQ ID NO: 2668 - protein, 127 aa, synthetic construct
EVQLLESGGGLVQPGGSLRLSCAASGFTLDYYAIGWFRQAPGKEREGVSCISSSGGSTNYADSVKGRFTISRDNAKNTVYLQMNSLRPEDTAVYYCADYVYPDYYCSEYVLLKYDYWGQGTQVTVSS

SEQ ID NO: 2669 - protein, 131 aa, synthetic construct
EVQLLESGGGLVQPGGSLRLSCAASGFTLDYYAIGWFRQAPGKEREGVSCIRTEISSTGDTTNYADSVKGRFTISRDNAKNTVYLQMNSLRPEDTAVYYCAAYVYPDDYCSEYVLSRYDYWGQGTQVTVSS

SEQ ID NO: 2670 - protein, 127 aa, synthetic construct
EVQLLESGGGLVQPGGSLRLSCAASGFTLDYYAIGWFRQAPGKEREGVSCISSSGDSTNYADSVKGRFTISRDNAKNTVYLQMNSLRPEDTAVYYCAAYVYPDYYCSDYDLLRYDYWGQGTQVTVSS

SEQ ID NO: 2671 - protein, 127 aa, synthetic construct
EVQLLESGGGLVQPGGSLRLSCAASGFTLDYYAIGWFRQAPGKEREGVSCISSSGDSTNYADSVKGRFTISRDNAKNTVYLQMNSLRPEDTAVYYCAAYVYPDYYCSDYVPLRYDYWGQGTQVTVSS

SEQ ID NO: 2672 - protein, 127 aa, synthetic construct
EVQLLESGGGLVQPGGSLRLSCAASGFTLDYYAIGWFRQAPGKEREGVSCISSSGGSTNYADSVKGRFTISRDNAKNTVYLQMNSLRFEDTAVYYCAAYVYPDYYCSEYVLSRYDNWGQGTQVTVSS

SEQ ID NO: 2673 - protein, 127 aa, synthetic construct
EVQLLESGGGLVQPGGSLRLSCAASGFTLDYYAIGWFRQAPGKEREGVSCISSSGGSTNYADSVKGRFTISRDNAKNTVYLQMNSLRPEDTAVYYCAAYVYPDYYCSDYVLIRYDYWGQGTQVTVSS

SEQ ID NO: 2674 - protein, 127 aa, synthetic construct
EVQLLESGGGLVQPGGSLRLSCAASGFTLDYYAIGWFRQAPGKEREGVSCISSSGGSTNYADSVKGRFTISRDNAKNTVYLQMNSLRPEDTAVYYCADYVYPDYYCSDYVLLRYDYWGQGTQVTVSS

SEQ ID NO: 2675 - protein, 127 aa, synthetic construct
EVQLLESGGGLVQPGGSLRLSCAASGFTLDYYAIGWFRQAPGKEREGVSCISSSGGSTNYADSVKGRFTISRDNAKNTVYLQMNSLRPEDTAVYYCAAYVYPDYSCSEYVPLRYDYWGQGTQVTVSS

SEQ ID NO: 2676 - protein, 127 aa, synthetic construct
EVQLLESGGGLVQPGGSLRLSCAASGFTLDYYAIGWFRQAPGKEREGVSCISSSGGSTNYADSVKGRFTISRDNAKNTVYLQMNSLRPEDTAVYYCAAYVYPDYYCSDYVLLRYVYWGQGTQVTVSS

SEQ ID NO: 2677 - protein, 127 aa, synthetic construct
EVQLLESGGGLVQPGGSLRLSCAASGFIMDYYAIGWFRQAPGKEREGVSCISSSGDSTNYADSVKGRFTISRDNAKNTVYLQMNSLRPEDTAVYYCAAYVYPDYYCSEYVLLKYGYWGQGTQVTVSS

SEQ ID NO: 2678 - protein, 127 aa, synthetic construct
EVQLLESGGGLVQPGGSLRLSCAASGFTLDYYAIGWFRQAPGKEREGVSCISSSGGSTNYADSVKGRFTISRDNAKNTVYLQMNSLRPEDTAVYYCAAYVYPDYYCTDYVLLRYDYWGQGTQVTVSS

SEQ ID NO: 2679 - protein, 127 aa, synthetic construct
EVQLLESGGGLVQPGGSLRLSCAASGFTLDYYAIGWFRQAPGKEREGVSCISSSGGSTNYADSVKGRFTISRDNAKNTVYLQMNSLRPEDTAVYYCAAYVYPDYYCPDYVLLRYDYWGQGTQVTVSS

SEQ ID NO: 2680 - protein, 127 aa, synthetic construct
EVQLLESGGGLVQPGGSLRLSCAASGFTLDYYAIGWFRQAPGKEREGVSCISSSGDSTNYADSVKGRFTISRDNAKNTVYLQMNSLRPEDTAVYYCAAYVYPDYYCPEYVLLKYDYWGQGTQVTVSS

SEQ ID NO: 2681 - protein, 127 aa, synthetic construct
EVQLLESGGGLVQPGGSLRLSCAASGFTLDYYAIGWFRQAPGKEREGVSCISSSGGSTNYADSVKGRFTISRDNAKNTVYLQMNSLRPEDTAVYYCAAYVYPDYYCSDYVLLRYAYWGQGTQVTVSS

SEQ ID NO: 2682 - protein, 127 aa, synthetic construct
EVQLLESGGGLVQPGGSLRLSCAASGFTLDYYAIGWFRQAPGKEREGVSCISTSGDSTNYADSVKGRFTISRDNAKNTVYLQMNSLRPEDTAVYYCAAYAYPDYYCSDYVLLRYDYWGQGTQVTVSS

SEQ ID NO: 2683 - protein, 127 aa, synthetic construct
EVQLLESGGGLVQPGGSLRLSCAASGFTLDYYAIGWFRQAPGKEREGVSCISTSGDSTNYADSVKGRLTISRDNAKNTVYLQMNSLRPEDTAVYYCAAYVYPDYFCSDYVLLRYDYWGQGTQVTVSS

SEQ ID NO: 2684 - protein, 127 aa, synthetic construct
EVQLLESGGGLVQPGGSLRLSCAASGFTLDYYAIGWFRQAPGKEREGVSCISSSGGSTNYADSVKGRFTISRDNAKNTVYLQMNSLRPEDTAVYYCAAYVYPDYYCSEYVLLKHDYWGQGTQVTVSS

SEQ ID NO: 2685 - protein, 127 aa, synthetic construct
EVQLLESGGGLVQPGGSLRLSCAASEFTLDYYAIGWFRQAPGKEREGVSCISSSGGSTNYADSVKGRFTISRDNAKNTVYLQMNSLRPEDTAVYYCAAYVYPDHYCSDYVLLRYDYWGQGTQVTVSS

SEQ ID NO: 2686 - protein, 127 aa, synthetic construct
EVQLLESGGGLVQPGGSLRLSCAASGFTLDYYAIGWFRQAPGKEREGVSCISSSGGSTNYADSVKGRFTISRDNAKNTVYLQMNSLRPEDTAVYYCAAYVYPDYYCSGYVPSRYDYWGQGTQVTVSS

SEQ ID NO: 2687 - protein, 127 aa, synthetic construct
EVQLLESGGGLVQPGGSLRLSCAASGFTLDYYAIGWFRQAPGKEREGVSCISSSGGSTNYADSVKGRFTISRDNAKNTVYLQMNSLRPEDTAVYYCAAYVYPDYYCSEYVLSRHDYWGQGTQVTVSS

SEQ ID NO: 2688 - protein, 127 aa, synthetic construct
EVQLLESGGGLVQPGGSLRLSCAASGFTLDYYAIGWFRQAPGKEREGVSCISSSGGSTNYADSVKGRFTISRDNAKNTVYLQMNSLRPEDTAVYYCAAYVYPDHYCSDYVLLRYDYWGQGTQVTVSS

SEQ ID NO: 2689 - protein, 127 aa, synthetic construct
EVQLLESGGGLVQPGGSLRLSCAASGFTLDYYAIGWFRQAPGKEREGVSCISSSGGSTNYADSVKGRFTISRDNAKNTVYLQMNSLRPEDTAVYYCAAYVYPEYYCSEYALLRYDYWGQGTQVTVSS

SEQ ID NO: 2690 - protein, 127 aa, synthetic construct
EVQLLESGGGLVQPGGSLRLSCAASGFTLDYYAIGWFRQAPGKEREGVSCISSSGGSTNYADSVKGRFTISRDNAKNTVYLQMNSLRPEDTAVYYCAAYVYPDYYCSDYVLLRYGYWGQGTQVTVSS

SEQ ID NO: 2691 - protein, 131 aa, synthetic construct
EVQLLESGGGLVQPGGSLRLSCAASGFTLDYYAIGWFRQAPGKEREGVSCIRTEISSTGDTTNYADSVKGRFTISRDNAKNTVYLQMNSLRPEDTAVYYCAAYAYPDYYCSEYVLSRYDYWGQGTQVTVSS

SEQ ID NO: 2692 - protein, 127 aa, synthetic construct
EVQLLESGGGLVQPGGSLRLSCAASGFTLDYYAIGWFRQAPGKEREGVSCISSSGDSTNYADSVKGRFTISRDNAKNTVYLQMNSLRPEDTAVYYCAAYVYPEYYCSDYVLLRYDYWGQGTQVTVSS

SEQ ID NO: 2693 - protein, 127 aa, synthetic construct
EVQLLESGGGLVQPGGSLRLSCAASGFTLDYYAIGWFRQAPGKEREGVSCISSSGGSTNYADSVKGRFTISRDNAKNTVYLQMNSLRPEDTAVYYCAAYVYPDYSCSDYVLLRYDYWGQGTQVTVSS

SEQ ID NO: 2694 - protein, 127 aa, synthetic construct
EVQLLESGGGLVQPGGSLRLSCAASGFTLDYYAIGWFRQAPGKEREGVSCISTSGDSTNYADSVKGRFTISRDNAKNTVYLQMNSLRPEDTAVYYCAAYVDPDYYCSDYVLLRYDYWGQGTQVTVSS

SEQ ID NO: 2695 - protein, 127 aa, synthetic construct
EVQLLESGGGLVQPGGSLRLSCAASGFTLDYYAIGWFRQAPGKEREGVSCISSSGGSTNYADSVKGRFTISRDNAKNTVYLQMNSLRPEDTAVYYCAAYFYPDYYCSEYVLLKYDYWGQGTQVTVSS

SEQ ID NO: 2696 - protein, 127 aa, synthetic construct
EVQLLESGGGLVQPGGSLRLSCAASGFTLDYYAIGWFRQAPGKEREGVSCISSSGDSTNYADSVKGRFTISRDNAKNTVYLQMNSLRPEDTAVYYCAAYVYPDYYCSDSVLLRYDYWGQGTQVTVSS

SEQ ID NO: 2697 - protein, 127 aa, synthetic construct
EVQLLESGGGLVQPGGSLRLSCAASGFTLDYYAIGWFRQAPGKEREGVSCISSSGGSTNYADSVKGRFTISRDNAKNTVYLQMNSLRPEDTAVYYCGAYVYPDYYCSDYVLLRYDYWGQGTQVTVSS

SEQ ID NO: 2698 - protein, 127 aa, synthetic construct
EVQLLESGGGLVQPGGSLRLSCAASGFTLDYYAIGWFRQAPGKEREGVSCISSSGGSTNYADSVKGRFTISRDNAKNTVYLQMNSLRPEDTAVYYCEAYVYPDYYCSDYVLLRYDYWGQGTQVTVSS

SEQ ID NO: 2699 - protein, 127 aa, synthetic construct
EVQLLESGGGLVQPGGSLRLSCAASGFTLDYYAIGWFRQAPGKEREGVSCISSSGGSTNYADSVKGRFTISRDNAKNTVYLQMNSLRPEDTAVYYCAAYVYPDNYCSEYVLLRHDYWGQGTQVTVSS

SEQ ID NO: 2700 - protein, 127 aa, synthetic construct
EVQLLESGGGLVQPGGSLRLSCAASGFTLDYYAIGWFRQAPGKEREGVSCISSSGGSTNYADSVKGRFTISRDNAKNTVYLQMNSLRPEDTAVYYCAAYVYPDYYCSDFVLLRYDYWGQGTQVTVSS

SEQ ID NO: 2701 - protein, 127 aa, synthetic construct
EVQLLESGGGLVQPGGSLRLSCAASGFTLDYYAIGWFRQAPGKEREGVSCISSSGGSTNYADSVKGRFTISRDNAKNTVYLQMNSLRPEDTAVYYCAAYVYPDYYCSEYVLLKYVYWGQGTQVTVSS

SEQ ID NO: 2702 - protein, 127 aa, synthetic construct
EVQLLESGGGLVQPGGSLRLSCAASGFTLDYYAIGWFRQAPGKEREGVSCISSSGGSTNYADSVKGRFTISRDNAKNTVYLQMNSLRPEDTAVYYCAAYFYPDYYCSDYVLLRYDYWGQGTQVTVSS

SEQ ID NO: 2703 - protein, 127 aa, synthetic construct
EVQLLESGGGLVQPGGSLRLSCAASGFTLDYYAIGWFRQAPGKEREGVSCISSSGGSTNYADSVKGRFTISRDNAKNTVYLQMNSLRPEDTAVYYCSAYVYPDYYCSDYVLLRYDYWGQGTQVTVSS

SEQ ID NO: 2704 - protein, 127 aa, synthetic construct
EVQLLESGGGLVQPGGSLRLSCAASGFTLDYYAIGWFRQAPGKEREGVSCISSSGGSTNYADSVKGRFTISRDNAKNTVYLQMNSLRPEDTAVYYCAAYVYPDYYCSDSVLLRYDYWGQGTQVTVSS

SEQ ID NO: 2705 - protein, 127 aa, synthetic construct
EVQLLESGGGLVQPGGSLRLSCAASGFTLDYYAIGWFRQAPGKEREGVSCISSSGDSTNYADSVKGRFTISRDNAKNTVYLQMNSLRPEDTAVYYCAAYVYPDYYCTDYVLLRYDYWGQGTQVTVSS

SEQ ID NO: 2706 - protein, 127 aa, synthetic construct
EVQLLESGGGLVQPGGSLRLSCAASGFTLDYYAIGWFRQAPGKEREGVSCISSSGGSTNYADSVKGRFTISRDNAKNTVYLQMNSLRPEDTAVYYCAAYVYPDYYCSEYVPLRYDNWGQGTQVTVSS

SEQ ID NO: 2707 - protein, 127 aa, synthetic construct
EVQLLESGGGLVQPGGSLRLSCAASGFTLDYYAIGWFRQAPGKEREGVSCISSSGGSTNYADSVKGRFTISRDNAKNTVYLQMNSLRPEDTAVYYCAAYVYPDYYCPEYVLLKYDYWGQGTQVTVSS

SEQ ID NO: 2708 - protein, 127 aa, synthetic construct
EVQLLESGGGLVQPGGSLRLSCAASGFTLDYYAIGWFRQAPGKEREGVSCISSSGGSTNYADSVKGRFTISRDNAKNTVYLQMNSLRPEDTAVYYCAAYVYPDYDCSDYVLLRYDYWGQGTQVTVSS

SEQ ID NO: 2709 - protein, 127 aa, synthetic construct
EVQLLESGGGLVQPGGSLRLSCAASGFTLDYYAIGWFRQAPGKEREGVSCISSSGGSTNYADSVKGRFTISRDNAKNTVYLQMNSLRPEDTAVYYCAAYVSPDYYCSDYVLLRYDYWGQGTQVTVSS

SEQ ID NO: 2710 - protein, 127 aa, synthetic construct
EVQLLESGGGLVQPGGSLRLSCAASGFTLDYYAIGWFRQAPGKEREGVSCISTSGDSTNYADSVKGRFTISRDNAKNTVYLQMNSLRPEDTAVYYCAAYVYPEYYCSDYVLLRYDYWGQGTQVTVSS

SEQ ID NO: 2711 - protein, 127 aa, synthetic construct
EVQLLESGGGLVQPGGSLRLSCAASGFTLDYYAIGWFRQAPGKEREGVSCISSSGGSTNYADSVKGRFTISRDNAKNTVYLQMNSLRPEDTAVYYCAASVYPDYYCSEYVPLRYDYWGQGTQVTVSS

SEQ ID NO: 2712 - protein, 127 aa, synthetic construct
EVQLLESGGGLVQPGGSLRLSCAASGFIMDYYAIGWFRQAPGKEREGVSCISSSGDSTNYADSVKGRFTVSRDNAKNTVYLQMNSLRPEDTAVYYCAAYVYPDHYCSEYVLLKYDYWGQGTQVTVSS

SEQ ID NO: 2713 - protein, 127 aa, synthetic construct
EVQLLESGGGLVQPGGSLRLSCAASGFTLDYYAIGWFRQAPGKEREGVSCISSSGGSTNYADSVKGRFTISRDNAKNTVYLQMNSLRPEDTAVYYCAAFVYPDYYCSEYVLLKYDYWGQGTQVTVSS

SEQ ID NO: 2714 - protein, 127 aa, synthetic construct
EVQLLESGGGLVQPGGSLRLSCAASGFTLDYYAIGWFRQAPGKEREGVSCISRDGGSTNYADSVKGRFTISRDNAKNTVYLQMNSLRPEDTAVYYCAAYVYPDYYCSEYVLLKYDHWGQGTQVTVSS

SEQ ID NO: 2715 - protein, 127 aa, synthetic construct
EVQLLESGGGLVQPGGSLRLSCAASGFTLDYYAIGWFRQAPGKEREGVSCISSSGDSTNYADSVKGRFTISRDNAKNTVYLQMNSLRPEDTAVYYCAAYVSPDYYCSEYVLLKYDYWGQGTQVTVSS

SEQ ID NO: 2716 - protein, 127 aa, synthetic construct
EVQLLESGGGLVQPGGSLRLSCAASGFTLDYYAIGWFRQAPGKEREGVSCISSSGGSTNYADSVKGRFTISRDNAKNTVYLQMNSLRPEDTAVYYCAAYVYPDYSCSEYVLLKYDYWGQGTQVTVSS

SEQ ID NO: 2717 - protein, 131 aa, synthetic construct
EVQLLESGGGLVQPGGSLRLSCAASGFTLDYYAIGWFRQAPGKEREGVSCIRTEISSTGDTTNYADSVKGRFTISRDNAKNTVYLQMNSLRPEDTAVYYCAAYVYPDYSCSEYVLSRYDYWGQGTQVTVSS

SEQ ID NO: 2718 - protein, 127 aa, synthetic construct
EVQLLESGGGLVQPGGSLRLSCAASGFTLDYYAIGWFRQAPGKEREGVSCISSSGGSTNYADSVKGRFTISRDNAKNTVYLQMNSLRPEDTAVYYCAAYVYSDYYCSDYVLLRYDYWGQGTQVTVSS

SEQ ID NO: 2719 - protein, 127 aa, synthetic construct
EVQLLESGGGLVQPGGSLRLSCAASGFIMDYYAIGWFRQAPGKEREGVSCISSSGDSTNYADSVKGRFTISRDNAKNTVYLQMNSLRPEDTAVYYCAAYVDPDYYCSEYVLLKYDYWGQGTQVTVSS

SEQ ID NO: 2720 - protein, 127 aa, synthetic construct
EVQLLESGGGLVQPGGSLRLSCAASGFIMDYYAIGWFRQAPGKEREGVSCISSSGDSTNYADSVKGRFTISRDNAKNTVYLQMNSLRPEDTAVYYCAAYVYPDYYCSEYGLLKYDYWGQGTQVTVSS

SEQ ID NO: 2721 - protein, 131 aa, synthetic construct
EVQLLESGGGLVQPGGSLRLSCAASGFTLDYYAIGWFRQAPGKEREGVSCIRTEISSTGDTTNYADSVKGRFTISRDNAKNTVYLQMNSLRPEDTAVYYCAAYVDPDYYCSEYVLSRYDYWGQGTQVTVSS

SEQ ID NO: 2722 - protein, 127 aa, synthetic construct
EVQLLESGGGLVQPGGSLRLSCAASGFTLDYYAIGWFRQAPGKEREGVSCISSSGGSTNYADSVKGRFTISRDNAKDTVYLQMNSLRPEDTAVYYCAAYVYPDYYCSDYVLSRYDYWGQGTQVTVSS

SEQ ID NO: 2723 - protein, 127 aa, synthetic construct
EVQLLESGGGLVQPGGSLRLSCAASGFTLDYYAIGWFRQAPGKEREGVSCISTSGDSTNYADSVKGRFTISRDNAKNTVYLQMNSLRPEDTAVYYCAAYVYPDDYCSDYVLLRYDYWGQGTQVTVSS

SEQ ID NO: 2724 - protein, 127 aa, synthetic construct
EVQLLESGGGLAQPGGSLRLSCAASGFTLDYYSIGWFRQAPGKEREGVSCISSSGDSTNYADSVKGRFTISRDNAKNTVYLQMNSLRPEDTAVYYCAAYVYPDYYCSEYVKLKYDYWGQGTQVTVSS

SEQ ID NO: 2725 - protein, 127 aa, synthetic construct
EVQLLESGGGLVQPGGSLRLSCAASGSTLDYYAIGWFRQAPGKEREGVSCISSSGGSTNYADSVKGRFTISRDNAKNTVYLQMNSLRPEDTAVYYCAAYVYPDYYCSDYDLLRYDYWGQGTQVTVSS

SEQ ID NO: 2726 - protein, 127 aa, synthetic construct
EVQLLESGGGLVQPGGSLRLSCAASGFTLDYYAIGWFRQAPGKEREGVSCISSSGDSTNYADSVKGRFTISRDNAKNTVYLQMNSLRPEDTAVYYCAAYVYPDHYCSEYVLLKYDYWGQGTQVTVSS

SEQ ID NO: 2727 - protein, 127 aa, synthetic construct
EVQLLESGGGLVQPGGSLRLSCAASGFTLDYYAIGWFRQAPGKEREGVSCISTSGDSTNYADSVKGRFTISRDNAKNTVYLQMNSLRPEDTAVYYCAASVYPDYYCSDYVLLRYDYWGQGTQVTVSS

SEQ ID NO: 2728 - protein, 127 aa, synthetic construct
EVQLLESGGGLVQPGGSLRLSCAASGFTLDYYAIGWFRQAPGKEREGVSCISSSGDSTNYADSVKGRFTISRDNAKNTVYLQMNSLRPEDTAVYYCADYVYPDYYCSDYVLLKYDYWGQGTQVTVSS

SEQ ID NO: 2729 - protein, 127 aa, synthetic construct
EVQLLESGGGLVQPGGSLRLSCAASGFTLDYYAIGWFRQAPGKEREGVSCISSSGDSTNYADSVKGRFTISRDNAKNTVYLQMNSLRPEDTAVYYCAAYVDPDYYCSDYVLLKYDYWGQGTQVTVSS

SEQ ID NO: 2730 - protein, 127 aa, synthetic construct
EVQLLESGGGLVQPGGSLRLSCAASGFTLDYYAIGWFRQAPGKEREGVSCISSSGGSTNYADSVKGRFTISRDNAKNTVYLQMNSLRPEDTAVYYCAAYDYPDYYCSDYVLLKYDYWGQGTQVTVSS

SEQ ID NO: 2731 - protein, 127 aa, synthetic construct
EVQLLESGGGLVQPGGSLRLSCAASGFTLDYYAIGWFRQAPGKEREGVSCISSSGGSTNYADSVKGRFTISRDNAKNTVYLQMNSLRPEDTAVYYCAAYVYPDDSCSDYDLLRYDYWGQGTQVTVSS

SEQ ID NO: 2732 - protein, 127 aa, synthetic construct
EVQLLESGGGLVQPGGSLRLSCAASGFTLDYYAIGWFRQAPGKEREGVSCISSSGGSTNYADSVKGRFTISRDNAKNTVYLQMNSLRPEDTAVYYCAVYVYPDYYCSDYVLLRYDYWGQGTQVTVSS

SEQ ID NO: 2733 - protein, 127 aa, synthetic construct
EVQLLESGGGLVQPGGSLRLSCAASGFTLDYYAIGWFRQAPGKEREGVSCISSSGGSTNYADSVKGRFTISRDNAKNTVYLQMNSLRPEDTAVYYCAAYVYPDDYCSDSDLLRYDYWGQGTQVTVSS

SEQ ID NO: 2734 - protein, 127 aa, synthetic construct
EVQLLESGGGLVQPGGSLRLSCAASGFTLDYYAIGWFRQAPGKEREGVSCISSSGDSTNYADSVKGRFTISRDNAKNTVYLQMNSLRPEDTAVYYCAAYVYPDYYCSDYVLLRYDHWGQGTQVTVSS

SEQ ID NO: 2735 - protein, 127 aa, synthetic construct
EVQLLESGGGLVQPGGSLRLSCAASGFTLDYYAIGWFRQAPGKEREGVSCISSSGGSTNYADSVKGRFTISRDNAKNTVYLQMNSLRPEDTAVYYCAAYVYPDYYCSDYVLLRYDHWGQGTQVTVSS

SEQ ID NO: 2736 - protein, 127 aa, synthetic construct
EVQLLESGGGLVQPGGSLRLSCAASGFTLDYYAIGWFRQAPGKEREGVSCISSSGGSTNYADSVKGRFTISRDNAKNTVYLQMNSLRPEDTAVYYCAAYVYPDYYCSDYVLLRYDDWGQGTQVTVSS

SEQ ID NO: 2737 - protein, 127 aa, synthetic construct
EVQLLESGGGLVQPGGSLRLSCAASGFTLDYYAIGWFRQAPGKEREGVSCISTSGDSTNYADSVKGRFTISRDNAKNTVYLQMNSLRPEDTAVYYCAVYVYPDYYCSDYVLLRYDYWGQGTQVTVSS

SEQ ID NO: 2738 - protein, 127 aa, synthetic construct
EVQLLESGGGLVQPGGSLRLSCAASGFTLDYYAIGWFRQAPGKEREGVSCISSSGGSTNYADSVKGRFTISRDNAKNTVYLQMNSLRPEDTAVYYCAAYVYPDYYCSDYVLFRYDYWGQGTQVTVSS

SEQ ID NO: 2739 - protein, 127 aa, synthetic construct
EVQLLESGGGLVQPGGSLRLSCAASGFTLDYYAIGWFRQAPGKEREGVSCISSSGGSTNYADSVKGRFTISRDNAKNTVYLQMNSLRPEDTAVYYCADYVYPDYYCSDYDLLRYDYWGQGTQVTVSS

SEQ ID NO: 2740 - protein, 127 aa, synthetic construct
EVQLLESGGGLVQPGGSLRLSCAASGFTLDYYAIGWFRQAPGKEREGVSCISSSGGSTNYADSVKGRFTISRDNAKNTVYLQMNSLRPEDTAVYYCAAYVDPDYYCSDYDLLRYDYWGQGTQVTVSS

SEQ ID NO: 2741 - protein, 127 aa, synthetic construct
EVQLLESGGGLVQPGGSLRLSCAASGFTLDYYAIGWFRQAPGKEREGVSCISSSGGSTNYADSVKGRFTISRDNAKNTVYLQMNSLRPEDTAVYYCAASVYPDYYCSDYDLLRYDYWGQGTQVTVSS

SEQ ID NO: 2742 - protein, 127 aa, synthetic construct
EVQLLESGGGLVQPGGSLRLSCAASGFTLDYYAIGWFRQAPGKEREGVSCISSSGGSTNYADSVKGRFTISRDNAKNTVYLQMNSLRPEDTAVYYCAAYDYPDYYCSDYDLLRYDYWGQGTQVTVSS

SEQ ID NO: 2743 - protein, 117 aa, synthetic construct
EVQLVESGGGLVQPGGSLRLSCAASGIPLYAMGWYRQAPGKQRELVASISSGGNAHYADSVKGRFTISRDNAKKTVYLQMNSVRPEDTGVYYCNIYRPQVPTTRYSWGQGTQVTVSS

SEQ ID NO: 2744 - protein, 119 aa, synthetic construct
EVQLVESGGGLVQPGGSLRLSCATSGLFFAQTAMGWYRQAPGKQRELVASISSSGQTRYADSVKGRFTVSRDNAKNTVYLQMNSVRPEDTGVYYCNIYRSQVPLTRYSWGQGTQVTVSS

SEQ ID NO: 2745 - protein, 117 aa, synthetic construct
EVQLVESGGGLVQPGGSLRLSCAASGMPSVAMGWYRQAPGKQRELVASISSGGNTHYADSVKGRFTISRDNAKKTVYLQMNSVRPEDTGVYYCNIYRSQVPPTRYSWGQGTQVTVSS

SEQ ID NO: 2746 - protein, 117 aa, synthetic construct
EVQLVESGGGLVQPGGSLRLSCAASGIPLVAMGWYRQAPGKQRELVASISSGGNTHYADSVKGRFTISRDNAKKTVYLQMNSVRPEDTGVYYCNIYRSQVPFTRYSWGQGTQVTVSS

SEQ ID NO: 2747 - protein, 117 aa, synthetic construct
EVQLVESGGGLVQPGGSLRLSCAASGIPLYAMGWYRQAPGKQRELVASISSGGNTHYADSVKGRFTISRDNAKKTVYLQMNSVRPEDTGVYYCNIYRPQVPTTRYSWGQGTQVTVSS

SEQ ID NO: 2748 - protein, 117 aa, synthetic construct
EVQLVESGGGLVQPGGSLRLSCAASGMPFVAMGWYRQAPGKQRELVASISTGGNTQYADSVKGRFTISRDNAKKTVYLQMNSVRPEDTGVYYCNIYRSQVSPTRYSWGQGTQVTVSS

SEQ ID NO: 2749 - protein, 118 aa, synthetic construct
EVQLVESGGGLVQPGGSLRLSCAVSGIPFALAMGWYRQAPGKQRELVASISSGGNTHYADSVKGRFTISRDSAKKTVYLQMNSVRPEDTGVYYCNIYRSQIPSTRYSWGQGTQVTVSS

SEQ ID NO: 2750 - protein, 117 aa, synthetic construct
EVQLVESGGGLVQPGGSLRLSCAASGMPFVAMGWYRQAPGKQRELVASIGSGGDTRYADSVKGRFTISRDNAKKTVYLQMNSVRPEDTGVYYCNIYRSQVSPTRYSWGQGTQVTVSS

SEQ ID NO: 2751 - protein, 119 aa, synthetic construct
EVQLVESGGGLVQPGGSLRLSCAVSGIPSPLPAMGWYRQAPGKQRELVASISSGGNTRYADSVKGRFTISRDNAKKTVYLQMNSVRPEDTGVYYCNIYRSQIPSTRYSWGQGTQVTVSS

SEQ ID NO: 2752 - protein, 117 aa, synthetic construct
EVQLVESGGGLVQPGGSLRLSCAASGIPLYAMGWYRQAPGKQRELVASISSGGNTHYADSVKGRFTISRDNAKKTVYLQMNSLRPEDTGVYYCNIYRPQVPTTRYSWGQGTQVTVSS

SEQ ID NO: 2753 - protein, 117 aa, synthetic construct
EVQLVESGGGLVQPGGSLRLSCAASGMPFVAMGWYRQAPGKQRELVASISSGGNTHYADSVKGRFTISRDNAKKTVYLQMNSVRPEDTGVYYCNIYRSQVSPTRYSWGQGTQVTVSS

SEQ ID NO: 2754 - protein, 119 aa, synthetic construct
EVQLVESGGGLVQPGGSLRLSCAASGIPSPLPAMGWYRQAPGKQRELVASISSGGNTRYADSVKGRFTISRDNAKKTVYLQMNSVRPEDTGVYYCNIYRSQIPSTRYSWGQGTQVTVSS

SEQ ID NO: 2755 - protein, 119 aa, synthetic construct
EVQLVESGGGLVQPGGSLRLSCAASGIPFALAAMGWYRQAPGKQRELVASISSGGNTRYADSVKGRFTISRDNAKKTVYLQMNSVRPEDTGVYYCNIYRSQVPSTRYSWGQGTQVTVSS

SEQ ID NO: 2756 - protein, 119 aa, synthetic construct
EVQLVESGGGLVQPGGSLRLSCAASGIPFALPAMGWYRQAPGKQREVVASISSGGDTHYADSVKGRFTISRDNAKKTVYLQMNSVRPEDTGVYYCNIYRSQVPTTRYSWGQGTQVTVSS

SEQ ID NO: 2757 - protein, 119 aa, synthetic construct
EVQLVESGGGLVQPGGSLRLSCAASGMPFALTAMGWYRQAPGKQRELVASISSGGNTHYADSVKGRFTISRDNAKKTLYLQMNSVRPEDTGVYYCNIYRSQVPTTRYSWGQGTQVTVSS

SEQ ID NO: 2758 - protein, 117 aa, synthetic construct
EVQLVESGGGLVQPGGSLRLSCAASGMPLTAMGWYRQAPGKQRELVASISSGGNTRYADSVKGRFTISRDNAKKTVYLQMNSVRPEDTGVYYCNIYRSQVPLTRYSWGQGTQVTVSS

SEQ ID NO: 2759 - protein, 119 aa, synthetic construct
EVQLVESGGGLVQPGGSLRLSCAASGIPSPLPAMGWYRQAPGKQRELVASISSGGNTRYADSVKGRFTISRDNAKKTVYLQMNSLRPEDTGVYYCNIYRSQVPSTRFAWGQGTQVTVSS

SEQ ID NO: 2760 - protein, 117 aa, synthetic construct
EVQLVESGGGLVQPGGSLRLSCAASGMPAVAMGWYRQAPGKQRELVASISSGDNTQYADSVKGRFTISRDNAKKTVYLQMNSVRPEDTGVYYCNIYRSQVPPTRYSWGQGTQVTVSS

SEQ ID NO: 2761 - protein, 119 aa, synthetic construct
EVQLVESGGGLVQPGGSLRLSCAASGIPFALTAMGWYRQAPGKQRELVASISSGGDTRYADSVKGRFTISRDNAKKTVYLQLNSVRPEDTGVYYCNIYRSQIPPTRYSWGQGTQVTVSS

SEQ ID NO: 2762 - protein, 117 aa, synthetic construct
EVQLVESGGGLVQPGGSLRLSCAASGMPFVAMGWYRQAPGKQRELVASISSGGATQYADSVKGRFTISRDNAKKTVYLQMNSVRPEDTGVYYCNIYRSQIPPTRYSWGQGTQVTVSS

SEQ ID NO: 2763 - protein, 119 aa, synthetic construct
EVQLVESGGGLVQPGGSLRLSCAAHGIPSPLPAMGWYRQAPGKQRELVASISSAGNTHYADSVKGRFTISRDNAKKTVYLQMNSVRPEDTGVYYCNIYRSQVPSTRYSWGQGTQVTVSS

SEQ ID NO: 2764 - protein, 117 aa, synthetic construct
EVQLVESGGGLVQPGGSLRLSCAASGMPAVAMGWYRQAPGKQRELVASISSGGNTHYADSVKGRFTISRDNAKKTVYLQMNSVRPEDTGVYYCNIYRSQVPFTRYSWGQGTQVTVSS

SEQ ID NO: 2765 - protein, 117 aa, synthetic construct
EVQLVESGGGLVQPGGSLRLSCAASGIPLYAMGWYRQAPGKQRELVASISSGGNTHYADSVKGRFTISRDNAKKTVYLQMNSLRPEDTGVYYCNIYRPRVPTTRYSWGQGTQVTVSS

SEQ ID NO: 2766 - protein, 119 aa, synthetic construct
EVQLVESGGGLVQPGGSLRLSCAASGIPSPLPAMGWYRQAPGKQRELVASISSAGNTHYADSVKGRFTISRDNAKKTVYLQMNSVRPEDTGVYYCNIFRSQIPTTRYSWGQGTQVTVSS

SEQ ID NO: 2767 - protein, 117 aa, synthetic construct
EVQLVESGGGLVQPGGSLRLSCAASGIPLVAMGWYRQAPGKQRELVASISSGGNTHYADSVKGRFTISRDNAKKTVYLQMNSVRPEDTGVYYCNIYRSQVPSTRYSWGQGTQVTVSS

SEQ ID NO: 2768 - protein, 117 aa, synthetic construct
EVQLVESGGGLVQPGGSLRLSCAASGIPLYAMGWYRQAPGKQRELVASISSGGNTHYADSVKGRFTISRDNAKKTVYLQMNSVRPEDTGVYYCNIYRPRVPTTRYSWGQGTQVTVSS

SEQ ID NO: 2769 - protein, 116 aa, synthetic construct
EVQLVESGGGLVQPGGSLRLSCAASGIPFALAWYRQAPGKQRELVASISSGGNTQYADSVKGRFTISRDNAKKTVYLQMNSVRPEDTGVYYCNIYRSQVPFTRYSWGQGTQVTVSS

SEQ ID NO: 2770 - protein, 117 aa, synthetic construct
EVQLVESGGGLVQPGGSLRLSCAASGMPLVAMGWYRQAPGKQRELVASISSGGNTGYADSVKGRFTISRDNAKKTVYLQMNSVRPEDTGVYYCNIYRSQGPPTRYSWGQGTQVTVSS

SEQ ID NO: 2771 - protein, 117 aa, synthetic construct
EVQLVESGGGLVQPGGSLRLSCAASGIPLYAMGWYRQAPGKQRELVASISSGGNTHYADSVKGRFTISRDNAKKTVYLQMNSVRPEDTGVYYCNIYRPQIPTTRYSWGQGTQVTVSS

SEQ ID NO: 2772 - protein, 117 aa, synthetic construct
EVQLVESGGGLVQPGGSLRLSCAASGMPSVAMGWYRQAPGKQRELVASIGSGGDTRYADSVKGRFTISRDNAKKTVYLQMNSVRPEDTGVYYCNIYRSQVRPTRYSWGQGTQVTVSS

SEQ ID NO: 2773 - protein, 117 aa, synthetic construct
EVQLVESGGGLVQPGGSLRLSCAASGMPLVAMGWYRQAPGKQRELVASISSGGNTGYADSVKGRFTISRDNAKKTVYLQMNSVRPEDTGVYYCNIYRSQVQPTRYSWGQGTQVTVSS

SEQ ID NO: 2774 - protein, 117 aa, synthetic construct
EVQLVESGGGLVQPGGSLRLSCAASGIPLYAMGWYRQAPGKQRELVASISSGGNTHYADSVKGRFTISRDNAKKTVYLQMNSLRPEDTGVYYCNIYRPQGPTTRYSWGQGTQVTVSS

SEQ ID NO: 2775 - protein, 117 aa, synthetic construct
EVQLVESGGGLVQPGGSLRLSCAASGIPLYAMGWYRQAPGKQRELVASISSGGNTHYADSVKGRFTISRDNAKKTVYLQMNSVRPEDTGVYYCNIYRPQGPTTRYSWGQGTQVTVSS

SEQ ID NO: 2776 - protein, 117 aa, synthetic construct
EVQLVESGGGLVQPGGSLRLSCAASGMPLVAMGWYRQAPGKQRELVASISSGGNTGYADSVKGRFTISRDNAKKTVYLQMNSVRPEDTGVYYCNIYRPQVPPTRYSWGQGTQVTVSS

SEQ ID NO: 2777 - protein, 117 aa, synthetic construct
EVQLVESGGGLVQPGGSLRLSCAASGMPAVAMGWYRQAPGKQRELVASISSGGNTHYADSVKGRFTISRDNAKKTVYLQMNSVRPEDTGVYYCNIYRPQVPPTRYSWGQGTQVTVSS

SEQ ID NO: 2778 - protein, 119 aa, synthetic construct
EVQLVESGGGLVQPGGSLRLSCAASGIPFALPAMGWYRQAPGKERELVASISSGGNTSYADSTKGRFTISRDNAKKTVYLQMNSVRPEDTGVYYCNIYRSRVPSTRYSWGQGTQVTVSS

SEQ ID NO: 2779 - protein, 119 aa, synthetic construct
EVQLVESGGGLVQPGGSLRLSCAASGIPFALTAMGWYRQAPGKQRELVASISSGGDIGYADSVKGRFTISRDNAKKTVYLQLNSVRPEDTGVYYCNIYRSQIPPTRYSWGQGTQVTVSS

SEQ ID NO: 2780 - protein, 119 aa, synthetic construct
EVQLVESGGGLVQPGGSLRLSCAASGIPFALPAMGWYRQAPGKQRELVASISSGGNTHYADSVKGRFTISRDNAKKTVYLQMNSVRPEDTGVYYCNIYRSQVPTTRYSWGQGTQVTVSS

SEQ ID NO: 2781 - protein, 119 aa, synthetic construct
EVQLVESGGGLVQPGGSLRLSCAASGIPFALPAMGWYRQAPGKQRELVASISSGGNTSYADSTKGRFTISRDNAKKTVYLQMNSVRPEDTGVYYCNIYRSRVPSTRYSWGQGTQVTVSS

SEQ ID NO: 2782 - protein, 119 aa, synthetic construct
EVQLVESGGGLVQPGGSLRLSCAASGIPFALTAMGWYRQAPGKQRELVASISSGANTHYADSVKGRFTISRDNAKKTLYLQMNSVRPEDTGVYYCNIYRSQVPTTRYSWGQGTQVTVSS

SEQ ID NO: 2783 - protein, 117 aa, synthetic construct
EVQLVESGGGLVQPGGSLRLSCATSGMPFVAMGWYRQAPGKQRELVASISSGGDTHYADSVKGRFTISRDNAKKTVYLQMNSVRPEDTGVYYCNIYRSQIPPTRYSWGQGTQVTVSS

SEQ ID NO: 2784 - protein, 117 aa, synthetic construct
EVQLVESGGGLVQPGGSLRLSCAASGIPLYAMGWYRQAPGKQRELVASISSGGNTHYADSVKGRFTISRDNAKKTVYLQMNSVRPEDTGVYYCNIYRPLVPTTRYSWGQGTQVTVSS

SEQ ID NO: 2785 - protein, 117 aa, synthetic construct
EVQLVESGGGLVQPGGSLRLSCAASGMPFVAMGWYRQAPGKQRELVASISSGGDTRYADSVKGRFTISRDNDKKTVYLQMNSVRPEDTGVYYCNIYRSRVPPTRYSWGQGTQVTVSS

SEQ ID NO: 2786 - protein, 119 aa, synthetic construct
EVQLVESGGGLVQPGGSLRLSCAASGIPFALPAMGWYRQAPGKQRELVASISSGGNTHYADSVKGRFTISRDNAKKTVYLQMNSVRPEDTGVYYCNIYRSRVPPTRYSWGQGTQVTVSS

SEQ ID NO: 2787 - protein, 119 aa, synthetic construct
EVQLVESGGGLVQPGGSLRLSCAASGIPFALPAMGWYRQAPGKQRELVASISSVGNTHYADSVKGRFTISRDNAKKTVYLQMNSVRPEDTGVYYCNIYRSHVPPTRYSWGQGTQVTVSS

SEQ ID NO: 2788 - protein, 117 aa, synthetic construct
EVQLVESGGGLVQPGGSLRLSCAASGMPAVAMGWYRQAPGKQRELVASISSGDNTQYADSVKGRFTISRDNAKKTVYLQMNSVRPEDTGVYYCNIYRSQGPPTRYSWGQGTQVTVSS

SEQ ID NO: 2789 - protein, 117 aa, synthetic construct
EVQLVESGGGLVQPGGSLRLSCAASGMPFVAMGWYRQAPGKQRELVASISTGGNTHYADSVKGRFTISRDNAKKTVYLQMNSVRPEDTGVYYCNIYRSQVPPTRYSWGQGTQVTVSS

SEQ ID NO: 2790 - protein, 117 aa, synthetic construct
EVQLVESGGGLVQPGGSLRLSCAASGMPSVAMGWYRQAPGKQRELVASISSGGNTHYADSVKGRFTISRDNAKKTVYLQMNSVRPEDTGVYYCNIYRSQGPPTRYSWGQGTQVTVSS

SEQ ID NO: 2791 - protein, 117 aa, synthetic construct
EVQLVESGGGLVQPGGSLRLSCAASGMPLVAMGWYRQAPGKQRELVASISSGGNTGYADSVKGRFTISRDNAKKTVYLQMNSVRPEDTGVYYCNIYRTQVPPTRYSWGQGTQVTVSS

SEQ ID NO: 2792 - protein, 117 aa, synthetic construct
EVQLVESGGGLVQPGGSLRLSCAASGMPSVAMGWYRQAPGKQRELVASISSGGNTHYADSVKGRFTISRDNAKKTVYLQMNSVRPEDTGVYYCNIYRTQVPPTRYSWGQGTQVTVSS

SEQ ID NO: 2793 - protein, 119 aa, synthetic construct
EVQLVESGGGLVQPGGSLRLSCAASGKFFALAAMGWYRQAPGKQRELVASISSGSNTQYADSVKGRFTISRDNAKNTLYLQMNSVRPEDTGVYYCNIYRSQVPPTRYSWGQGTQVTVSS

SEQ ID NO: 2794 - protein, 119 aa, synthetic construct
EVQLVESGGGLVQPGGSLRLSCAASGIPFALPAMGWYRQAPGKQRELVASISSGGNTTYADSTKGRFTISRDNAKKTVYLQMNSVRPEDTGVYYCNIYRSGVPSTRYSWGQGTQVTVSS

SEQ ID NO: 2795 - protein, 119 aa, synthetic construct
EVQLVESGGGLVQPGGSLRLSCATSGIPFALPAMGWYRQAPGKQRELVASISSGGNTNYADSTKGRFTISRDNAKKTVYLQMNSVRPEDTGVYYCNIYRSGVPSTRYSWGQGTQVTVSS

SEQ ID NO: 2796 - protein, 117 aa, synthetic construct
EVQLVESGGGLVQPGGSLRLSCAASGIPLVAMGWYRQAPGKQRELVASISSGGNTRYADSVKGRFTISRDNAKKTVYLQMNSVRPEDTGVYYCNIYRSEVPPTRYSWGQGTQVTVSS

SEQ ID NO: 2797 - protein, 117 aa, synthetic construct
EVQLVESGGGLVQPGGSLRLSCAASGMPLVAMGWYRQAPGKQRELVASISSGGNTGYADSVKGRFTISRDNAKKTVYLQMNSVRPEDTGVYYCNIYRSQAPPTKYSWGQGTQVTVSS

SEQ ID NO: 2798 - protein, 117 aa, synthetic construct
EVQLVESGGGLVQPGGSLRLSCAASGIPLYAMGWYRQAPGKQRELVASISSGGNTHYADSVKGRFTISRDNAKKTVYLQMNSVRPEDTGVYYCNIYRPHVPTTRYSWGQGTQVTVSS

SEQ ID NO: 2799 - protein, 119 aa, synthetic construct
EVQLVESGGGLVQPGGSLRLSCAASGMPFALTAMGWYRQAPGKQRELVASISSGGNTHYADSVKGRFTISRDNAKKTLYLQMNSVRPEDTGVYYCNIYRSQGPTTRYSWGQGTQVTVSS

SEQ ID NO: 2800 - protein, 119 aa, synthetic construct
EVQLVESGGGLVQPGGSLRLSCAASGMFFAQTAMGWYRQAPGKQRELVASISSGSNTRYADSVKGRFTISRDNAKNTVYLQMNSVRPEDTGVYYCNIYRSQAPPTRYSWGQGTQVTVSS

SEQ ID NO: 2801 - protein, 119 aa, synthetic construct
EVQLVESGGGLVQPGGSLRLSCAASGIPFALTAMGWYRQAPGKQRELVASISSAGNTHYADSVKGRFTISRDVAKKTVYLQMNSVRPEDTGVYYCNIYRPQVPSTRYSWGQGTQVTVSS

SEQ ID NO: 2802 - protein, 119 aa, synthetic construct
EVQLVESGGGLVQPGGSLRLSCAASGIPFALPAMGWYRQAPGKERELVASISSGGNTTYADSTKGRFTISRDDAKKTVYLQMNSVRPEDTGVYYCNIYRSRVPSTRYSWGQGTQVTVSS

SEQ ID NO: 2803 - protein, 119 aa, synthetic construct
EVQLVESGGGLAQPGGSLRLSCAASGIPSPLPAVGWYRQAPGKQRELVASISSGGNTRYADSVKGRFTISRDNAKKTVYLQMNSLRPEDTGVYYCNIYRSQVPSTRFAWGQGTQVTVSS

SEQ ID NO: 2804 - protein, 117 aa, synthetic construct
EVQLVESGGGLVQPGGSLRLSCAASGIPLYAMGWYRQAPGKQRELVASISRGGNTHYADSVKGRFTISRDNAKKTVYLQMNSVRPEDTGVYYCNIYRPHVPTTRYSWGQGTQVTVSS

SEQ ID NO: 2805 - protein, 117 aa, synthetic construct
EVQLVESGGGLVQPGGSLRLSCAASGMPFVAMGWYRQAPGKQRELVASISTGGNTHYADSVKGRFTISRDNAKKTVYLQMNSVRPEDTGVYYCNIYRSEVPPTRYSWGQGTQVTVSS

SEQ ID NO: 2806 - protein, 119 aa, synthetic construct
EVQLVESGGGLVQPGGSLRLSCAASGIPFALPAMGWYRQAPGKQRELVASIGSVGNTHYADSVKGRFTISRDNAKKTVYLQMNSVRPEDTGVYYCNIYRSQVPVTRYSWGQGTQVTVSS

SEQ ID NO: 2807 - protein, 119 aa, synthetic construct
EVQLVESGGGLVQPGGSLRLSCAASGIPSPLPAMGWYRQAPGKQRELVASISSVDNTRYADSVKGRFTISRDNAKQTVYLQMNSVRPEDTGVYYCNIYRSQVSSTRYSWGQGTQVTVSS

SEQ ID NO: 2808 - protein, 119 aa, synthetic construct
EVQLVESGGGLVQPGGSLRLSCAASGIPSPLPAMGWYRQAPGKQRELVASISSVDNTRYADSVKGRFTISRDNAKKTVYLQMNSVRPEDTGVYYCNIYRSQVSSTRYSWGQGTQVTVSS

SEQ ID NO: 2809 - protein, 117 aa, synthetic construct
EVQLVESGGGLVQPGGSLRLSCAASGMPLVAMGWYRQAPGKQRELVASISSGGNTGYADSVKGRFTISRDNAKKTVYLQMNSVRPEDTGVYYCNIYRSQAPPTRYSWGQGTQVTVSS

SEQ ID NO: 2810 - protein, 119 aa, synthetic construct
EVQLVESGGGLVQPGGSLRLSCAAPGIPSPLPAMGWYRQAPGKQRELVASISSVDSTRYADSVKGRFTISRDNAKKTVYLQMNSVRPEDTGVYYCNIYRSQVSSTRYSWGQGTQVTVSS

SEQ ID NO: 2811 - protein, 119 aa, synthetic construct
EVQLVESGGGLVQPGGSLRLSCAASGIPFALPAMGWYRQAPGKQRELVASIGSGGDTRYADSVKGRFTISRDNAKKTVYLQMNSVRPEDTGVYYCNIYRSQIPTTRYSWGQGTQVTVSS

SEQ ID NO: 2812 - protein, 119 aa, synthetic construct
EVQLVESGGGLVQPGGSLRLSCAASGIPFALAAMGWYRQAPGKQRELVASISSGGNTRYADSVKGRFTISRDNAKKTVYLQMNSVRPEDTGVYYCNIYRSKVPSTRYSWGQGTQVTVSS

SEQ ID NO: 2813 - protein, 117 aa, synthetic construct
EVQLVESGGGLVQPGGSLRLSCAASGMPFVAMGWYRQAPGKQRELVASISSGGNTHYADSVKGRFTISRDNAKKTVYLQMNSVRPEDTGVYYCNIYRSQISPTRYSWGQGTQVTVSS

SEQ ID NO: 2814 - protein, 119 aa, synthetic construct
EVQLVESGGGLVQPGGSLRLSCAVSGIPSPLPAMGWYRQAPGKQRELVASISSGGNTRYADSVKGRFTISRDNAKKTVYLQMNSVRPEDTGVYYCNIYRSQRPSTRYSWGQGTQVTVSS

SEQ ID NO: 2815 - protein, 117 aa, synthetic construct
EVQLVESGGGLVQPGGSLRLSCAASGMPFVAMGWYRQAPGKQRELVASISSGGNTHYADSVKGRFTISRDNAKKTVYLQVNSVRPEDTGVYYCNIYRSQISPTRYSWGQGTQVTVSS

SEQ ID NO: 2816 - protein, 119 aa, synthetic construct
EVQLVESGGGLVQPGGSLRLSCAASGIPFALPAMGWYRQAPGKQREVVASISSGGDTHYADSVKGRFTISRDNAKKTVYLQMNSVRPEDTGVYYCNIYRSHVPTTRYSWGQGTQVTVSS

SEQ ID NO: 2817 - protein, 117 aa, synthetic construct
EVQLVESGGGLVQPGGSLRLSCAASGMPLTAMGWYRQAPGKQRELVASISSGGNTRYADSVKGRFTISRDNAKKTVYLQMNSVRPEDTGVYYCNIYRPQVPLTRYSWGQGTQVTVSS

SEQ ID NO: 2818 - protein, 119 aa, synthetic construct
EVQLVESGGGLVQPGGSLRLSCAASGMFLALTAMGWYRQAPGKQRELVASISSSSDTRYADSVKGRFTISRDNAKNTVYLQMNSVRPEDTGVYYCNIYRSKVPPTRYSWGQGTQVTVSS

SEQ ID NO: 2819 - protein, 117 aa, synthetic construct
EVQLVESGGGLVQPGGSLRLSCAASGIPLYAMGWYRQAPGKQRELVASISSGGNTHYADSVKGRFTISRDNAKKTVYLQMNSVRPEDTGVYYCNIYRPKVPTTRYSWGQGTQVTVSS

SEQ ID NO: 2820 - protein, 117 aa, synthetic construct
EVQLVESGGGLVQPGGSLRLSCAASGIPLYAMGWYRQAPGKQRELVASISSGGNTHYADSVKGRFTISRDNAKKTVYLQMNSVRPEDTGVYYCNIYRPQVPSTRYSWGQGTQVTVSS

SEQ ID NO: 2821 - protein, 119 aa, synthetic construct
EVQLVESGGGLVQPGGSLRLSCAASGIPFALTAMGWYRQAPGKQRELVASISSAGNTHYADSVKGRFTISRDVAKKTVYLQMNSVRPEDTGVYYCNIYRSQVPSTRYSWGQGTQVTVSS

SEQ ID NO: 2822 - protein, 117 aa, synthetic construct
EVQLVESGGGLVQPGGSLRLSCAASGMPLVAMGWYRQAPGKQRELVASISSGGNTDYADSVKGRFTISRDNAKKTVYLQMNSVRPEDTGVYYCNIYRPQVPPTRYSWGQGTQVTVSS

SEQ ID NO: 2823 - protein, 119 aa, synthetic construct
EVQLVESGGGLVQPGGSLRLSCATSGLFFAQTAMGWYRQAPGKQRELVASISSSGQTRYADSVKGRFTVSRDNAKNTVYLQMNSVRPEDTGVYYCNIYRPQVPLTRYSWGQGTQVTVSS

SEQ ID NO: 2824 - protein, 119 aa, synthetic construct
EVQLVESGGGLVQPGGSLRLSCAAHGIPSPLPAMGWYRQAPGKQRELVASISSAGNTHYADSVKGRFTISRDNAKKTVYLQMNSVRPEDTGVYYCNIYRSQVPYTRYSWGQGTQVTVSS

SEQ ID NO: 2825 - protein, 119 aa, synthetic construct
EVQLVESGGGLVQPGGSLRLSCAASGIPFALPAMGWYRQAPGKQRELVASISSGGNTAYADSVKGRFTISRDDAKKTVYLQMNSVRPEDTGVYYCNIYRSQVPVTRYSWGQGTQVTVSS

SEQ ID NO: 2826 - protein, 117 aa, synthetic construct
EVQLVESGGGLVQPGGSLRLSCAASGMPLVAMGWYRQAPGKQRELVASISSGGNTGYADSVKGRFTISRDNAKKTVYLQMNSVRPEDTSVYYCNIYRSQASPTRYSWGQGTQVTVSS

SEQ ID NO: 2827 - protein, 119 aa, synthetic construct
EVQLVESGGGLVQPGGSLRLSCAASGIPFALPAMGWYRQAPGKQRELVASISSGGNTTYADSTKGRFTISRDNAKKTVYLQMNSVRPEDTGVYYCNIYRSRVPTTRYSWGQGTQVTVSS

SEQ ID NO: 2828 - protein, 119 aa, synthetic construct
EVQLVESGGGLVQPGGSLRLSCAASGIPFALPAMGWYRQAPGKQRELVASISSGGNTTYADSVKGRFTISRDDAKKTLYLQMNSVRPEDTGVYYCNIYRSRVPTTRYSWGQGTQVTVSS

SEQ ID NO: 2829 - protein, 119 aa, synthetic construct
EVQLVESGGGLVQPGGSLRLSCAASGIPFALPAMGWYRQAPGKQRELVASISPGGNTSYADSTKGRFTISRDNAKKTVYLQMNSVRPEDTGVYYCNIYRSRVPSTRYSWGQGTQVTVSS

SEQ ID NO: 2830 - protein, 117 aa, synthetic construct
EVQLVESGGGLVQPGGSLRLSCAASGIPLVAMGWYRQAPGKQHELVASISSGGNTRYADSVKGRFTISRDNAKKTVYLQMNSVRPEDTGVYYCNIYRSEVPSTRYSWGQGTQVTVSS

SEQ ID NO: 2831 - protein, 8 aa, synthetic construct
GFTLDYYA

SEQ ID NO: 2832 - protein, 8 aa, synthetic construct
EFTLDYYA

SEQ ID NO: 2833 - protein, 8 aa, synthetic construct
EFTLDYYA

SEQ ID NO: 2834 - protein, 8 aa, synthetic construct
GFTLDYYA

SEQ ID NO: 2835 - protein, 8 aa, synthetic construct
GFTLEYYA

SEQ ID NO: 2836 - protein, 8 aa, synthetic construct
GFTLDYYA

SEQ ID NO: 2837 - protein, 8 aa, synthetic construct
GFTLDYYG

SEQ ID NO: 2838 - protein, 8 aa, synthetic construct
GFTLDYYA

SEQ ID NO: 2839 - protein, 8 aa, synthetic construct
EFTLDYYA

SEQ ID NO: 2840 - protein, 8 aa, synthetic construct
ESTLDYYA

SEQ ID NO: 2841 - protein, 8 aa, synthetic construct
GFTLDYYA

SEQ ID NO: 2842 - protein, 8 aa, synthetic construct
EFTLDYYA

SEQ ID NO: 2843 - protein, 8 aa, synthetic construct
GFTLDYYA

SEQ ID NO: 2844 - protein, 8 aa, synthetic construct
GFTLDYYA

SEQ ID NO: 2845 - protein, 8 aa, synthetic construct
GFTLDYYA

SEQ ID NO: 2846 - protein, 8 aa, synthetic construct
GFTLDYYS

SEQ ID NO: 2847 - protein, 8 aa, synthetic construct
EFTLDYYA

SEQ ID NO: 2848 - protein, 8 aa, synthetic construct
DVTLDYYA

SEQ ID NO: 2849 - protein, 8 aa, synthetic construct
GFTLDYYA

SEQ ID NO: 2850 - protein, 8 aa, synthetic construct
GFTLDYYS

SEQ ID NO: 2851 - protein, 8 aa, synthetic construct
GFPLGYYS

SEQ ID NO: 2852 - protein, 8 aa, synthetic construct
GFTLGYYS

SEQ ID NO: 2853 - protein, 8 aa, synthetic construct
GFTLDYYA

SEQ ID NO: 2854 - protein, 8 aa, synthetic construct
GFTLDYYA

SEQ ID NO: 2855 - protein, 8 aa, synthetic construct
EFTLDYYA

SEQ ID NO: 2856 - protein, 8 aa, synthetic construct
GFTLDYYA

SEQ ID NO: 2857 - protein, 8 aa, synthetic construct
GFALDYYA

SEQ ID NO: 2858 - protein, 8 aa, synthetic construct
GFTLDYYA

SEQ ID NO: 2859 - protein, 8 aa, synthetic construct
GFTLDYYS

SEQ ID NO: 2860 - protein, 8 aa, synthetic construct
GFTLDYYA

SEQ ID NO: 2861 - protein, 8 aa, synthetic construct
GFTLDYYA

SEQ ID NO: 2862 - protein, 8 aa, synthetic construct
GFTLDYYA

SEQ ID NO: 2863 - protein, 8 aa, synthetic construct
GFTLDYYA

SEQ ID NO: 2864 - protein, 8 aa, synthetic construct
GFTLDYYA

SEQ ID NO: 2865 - protein, 8 aa, synthetic construct
GFTLDYYA

SEQ ID NO: 2866 - protein, 8 aa, synthetic construct
GFTLDYYA

SEQ ID NO: 2867 - protein, 8 aa, synthetic construct
GFTLDYYG

SEQ ID NO: 2868 - protein, 8 aa, synthetic construct
GFTLDYYA

SEQ ID NO: 2869 - protein, 8 aa, synthetic construct
GFTLDYYS

SEQ ID NO: 2870 - protein, 8 aa, synthetic construct
GFTLDYYA

SEQ ID NO: 2871 - protein, 8 aa, synthetic construct
GFTLDYYA

SEQ ID NO: 2872 - protein, 8 aa, synthetic construct
GFTLDYYA

SEQ ID NO: 2873 - protein, 8 aa, synthetic construct
GFTLDYYA

SEQ ID NO: 2874 - protein, 8 aa, synthetic construct
GFTLDYYA

SEQ ID NO: 2875 - protein, 8 aa, synthetic construct
GFTLDYYA

SEQ ID NO: 2876 - protein, 8 aa, synthetic construct
GFTLDYYA

SEQ ID NO: 2877 - protein, 8 aa, synthetic construct
GFTLDYYA

SEQ ID NO: 2878 - protein, 8 aa, synthetic construct
GFTLDYYA

SEQ ID NO: 2879 - protein, 8 aa, synthetic construct
GFTLDYYA

SEQ ID NO: 2880 - protein, 8 aa, synthetic construct
GFTLDYYA

SEQ ID NO: 2881 - protein, 8 aa, synthetic construct
GFTLDYYA

SEQ ID NO: 2882 - protein, 8 aa, synthetic construct
GFTLDYYA

SEQ ID NO: 2883 - protein, 8 aa, synthetic construct
GFTLDYYA

SEQ ID NO: 2884 - protein, 8 aa, synthetic construct
GFTLDYYA

SEQ ID NO: 2885 - protein, 8 aa, synthetic construct
GFTLDYYA

SEQ ID NO: 2886 - protein, 8 aa, synthetic construct
GFTLDYYA

SEQ ID NO: 2887 - protein, 8 aa, synthetic construct
GFTLDYYA

SEQ ID NO: 2888 - protein, 8 aa, synthetic construct
GFTLDYYA

SEQ ID NO: 2889 - protein, 8 aa, synthetic construct
GFTLDYYA

SEQ ID NO: 2890 - protein, 8 aa, synthetic construct
GFTLDYYA

SEQ ID NO: 2891 - protein, 8 aa, synthetic construct
GFTLDYYA

SEQ ID NO: 2892 - protein, 8 aa, synthetic construct
GFTLDYYA

SEQ ID NO: 2893 - protein, 8 aa, synthetic construct
GFTLDYYA

SEQ ID NO: 2894 - protein, 8 aa, synthetic construct
GFTLDYYA

SEQ ID NO: 2895 - protein, 8 aa, synthetic construct
GFTLDYYA

SEQ ID NO: 2896 - protein, 8 aa, synthetic construct
GFIMDYYA

SEQ ID NO: 2897 - protein, 8 aa, synthetic construct
GFTLDYYA

SEQ ID NO: 2898 - protein, 8 aa, synthetic construct
GFTLDYYA

SEQ ID NO: 2899 - protein, 8 aa, synthetic construct
GFTLDYYA

SEQ ID NO: 2900 - protein, 8 aa, synthetic construct
GFTLDYYA

SEQ ID NO: 2901 - protein, 8 aa, synthetic construct
GFTLDYYA

SEQ ID NO: 2902 - protein, 8 aa, synthetic construct
GFTLDYYA

SEQ ID NO: 2903 - protein, 8 aa, synthetic construct
GFTLDYYA

SEQ ID NO: 2904 - protein, 8 aa, synthetic construct
GFTLDYYA

SEQ ID NO: 2905 - protein, 8 aa, synthetic construct
GFTLDYYA

SEQ ID NO: 2906 - protein, 8 aa, synthetic construct
GFTLDYYA

SEQ ID NO: 2907 - protein, 8 aa, synthetic construct
GFIMDYYA

SEQ ID NO: 2908 - protein, 8 aa, synthetic construct
GFTLDYYA

SEQ ID NO: 2909 - protein, 8 aa, synthetic construct
GFTLDYYA

SEQ ID NO: 2910 - protein, 8 aa, synthetic construct
GFTLDYYA

SEQ ID NO: 2911 - protein, 8 aa, synthetic construct
GFTLDYYA

SEQ ID NO: 2912 - protein, 8 aa, synthetic construct
GFTLDYYA

SEQ ID NO: 2913 - protein, 8 aa, synthetic construct
GFTLDYYA

SEQ ID NO: 2914 - protein, 8 aa, synthetic construct
GFTLDYYA

SEQ ID NO: 2915 - protein, 8 aa, synthetic construct
GFTLDYYA

SEQ ID NO: 2916 - protein, 8 aa, synthetic construct
GFTLDYYA

SEQ ID NO: 2917 - protein, 8 aa, synthetic construct
GFTLDYYA

SEQ ID NO: 2918 - protein, 8 aa, synthetic construct
GFTLDYYA

SEQ ID NO: 2919 - protein, 8 aa, synthetic construct
GFTLDYYA

SEQ ID NO: 2920 - protein, 8 aa, synthetic construct
GFTLDYYA

SEQ ID NO: 2921 - protein, 8 aa, synthetic construct
GFIMDYYA

SEQ ID NO: 2922 - protein, 8 aa, synthetic construct
GFTLDYYA

SEQ ID NO: 2923 - protein, 8 aa, synthetic construct
GFTLDYYA

SEQ ID NO: 2924 - protein, 8 aa, synthetic construct
GFTLDYYA

SEQ ID NO: 2925 - protein, 8 aa, synthetic construct
GFTLDYYA

SEQ ID NO: 2926 - protein, 8 aa, synthetic construct
GFTLDYYA

SEQ ID NO: 2927 - protein, 8 aa, synthetic construct
GFTLDYYA

SEQ ID NO: 2928 - protein, 8 aa, synthetic construct
GFTLDYYA

SEQ ID NO: 2929 - protein, 8 aa, synthetic construct
GFTLDYYA

SEQ ID NO: 2930 - protein, 8 aa, synthetic construct
GFTLDYYA

SEQ ID NO: 2931 - protein, 8 aa, synthetic construct
GFTLDYYA

SEQ ID NO: 2932 - protein, 8 aa, synthetic construct
GFTLDYYA

SEQ ID NO: 2933 - protein, 8 aa, synthetic construct
GFTLDYYA

SEQ ID NO: 2934 - protein, 8 aa, synthetic construct
GFTLDYYA

SEQ ID NO: 2935 - protein, 8 aa, synthetic construct
GFTLDYYA

SEQ ID NO: 2936 - protein, 8 aa, synthetic construct
GFTLDYYA

SEQ ID NO: 2937 - protein, 8 aa, synthetic construct
GFTLDYYA

SEQ ID NO: 2938 - protein, 8 aa, synthetic construct
GFTLDYYA

SEQ ID NO: 2939 - protein, 8 aa, synthetic construct
GFTLDYYA

SEQ ID NO: 2940 - protein, 8 aa, synthetic construct
GFTLDYYA

SEQ ID NO: 2941 - protein, 8 aa, synthetic construct
GFTLDYYA

SEQ ID NO: 2942 - protein, 8 aa, synthetic construct
GFTLDYYA

SEQ ID NO: 2943 - protein, 8 aa, synthetic construct
GFTLDYYA

SEQ ID NO: 2944 - protein, 8 aa, synthetic construct
GFTLDYYA

SEQ ID NO: 2945 - protein, 8 aa, synthetic construct
GFTLDYYA

SEQ ID NO: 2946 - protein, 8 aa, synthetic construct
GFTLDYYA

SEQ ID NO: 2947 - protein, 8 aa, synthetic construct
GFTLDYYA

SEQ ID NO: 2948 - protein, 8 aa, synthetic construct
GFTLDYYA

SEQ ID NO: 2949 - protein, 8 aa, synthetic construct
GFTLDYYA

SEQ ID NO: 2950 - protein, 8 aa, synthetic construct
GFTLDYYA

SEQ ID NO: 2951 - protein, 8 aa, synthetic construct
GFTLDYYA

SEQ ID NO: 2952 - protein, 8 aa, synthetic construct
GFTLDYYA

SEQ ID NO: 2953 - protein, 8 aa, synthetic construct
GFTLDYYA

SEQ ID NO: 2954 - protein, 8 aa, synthetic construct
GFIMDYYA

SEQ ID NO: 2955 - protein, 8 aa, synthetic construct
GFTLDYYA

SEQ ID NO: 2956 - protein, 8 aa, synthetic construct
GFTLDYYA

SEQ ID NO: 2957 - protein, 8 aa, synthetic construct
GFTLDYYA

SEQ ID NO: 2958 - protein, 8 aa, synthetic construct
GFTLDYYA

SEQ ID NO: 2959 - protein, 8 aa, synthetic construct
GFTLDYYA

SEQ ID NO: 2960 - protein, 8 aa, synthetic construct
GFTLDYYA

SEQ ID NO: 2961 - protein, 8 aa, synthetic construct
GFTLDYYA

SEQ ID NO: 2962 - protein, 8 aa, synthetic construct
EFTLDYYA

SEQ ID NO: 2963 - protein, 8 aa, synthetic construct
GFTLDYYA

SEQ ID NO: 2964 - protein, 8 aa, synthetic construct
GFTLDYYA

SEQ ID NO: 2965 - protein, 8 aa, synthetic construct
GFTLDYYA

SEQ ID NO: 2966 - protein, 8 aa, synthetic construct
GFTLDYYA

SEQ ID NO: 2967 - protein, 8 aa, synthetic construct
GFTLDYYA

SEQ ID NO: 2968 - protein, 8 aa, synthetic construct
GFTLDYYA

SEQ ID NO: 2969 - protein, 8 aa, synthetic construct
GFTLDYYA

SEQ ID NO: 2970 - protein, 8 aa, synthetic construct
GFTLDYYA

SEQ ID NO: 2971 - protein, 8 aa, synthetic construct
GFTLDYYA

SEQ ID NO: 2972 - protein, 8 aa, synthetic construct
GFTLDYYA

SEQ ID NO: 2973 - protein, 8 aa, synthetic construct
GFTLDYYA

SEQ ID NO: 2974 - protein, 8 aa, synthetic construct
GFTLDYYA

SEQ ID NO: 2975 - protein, 8 aa, synthetic construct
GFTLDYYA

SEQ ID NO: 2976 - protein, 8 aa, synthetic construct
GFTLDYYA

SEQ ID NO: 2977 - protein, 8 aa, synthetic construct
GFTLDYYA

SEQ ID NO: 2978 - protein, 8 aa, synthetic construct
GFTLDYYA

SEQ ID NO: 2979 - protein, 8 aa, synthetic construct
GFTLDYYA

SEQ ID NO: 2980 - protein, 8 aa, synthetic construct
GFTLDYYA

SEQ ID NO: 2981 - protein, 8 aa, synthetic construct
GFTLDYYA

SEQ ID NO: 2982 - protein, 8 aa, synthetic construct
GFTLDYYA

SEQ ID NO: 2983 - protein, 8 aa, synthetic construct
GFTLDYYA

SEQ ID NO: 2984 - protein, 8 aa, synthetic construct
GFTLDYYA

SEQ ID NO: 2985 - protein, 8 aa, synthetic construct
GFTLDYYA

SEQ ID NO: 2986 - protein, 8 aa, synthetic construct
GFTLDYYA

SEQ ID NO: 2987 - protein, 8 aa, synthetic construct
GFTLDYYA

SEQ ID NO: 2988 - protein, 8 aa, synthetic construct
GFTLDYYA

SEQ ID NO: 2989 - protein, 8 aa, synthetic construct
GFIMDYYA

SEQ ID NO: 2990 - protein, 8 aa, synthetic construct
GFTLDYYA

SEQ ID NO: 2991 - protein, 8 aa, synthetic construct
GFTLDYYA

SEQ ID NO: 2992 - protein, 8 aa, synthetic construct
GFTLDYYA

SEQ ID NO: 2993 - protein, 8 aa, synthetic construct
GFTLDYYA

SEQ ID NO: 2994 - protein, 8 aa, synthetic construct
GFTLDYYA

SEQ ID NO: 2995 - protein, 8 aa, synthetic construct
GFTLDYYA

SEQ ID NO: 2996 - protein, 8 aa, synthetic construct
GFIMDYYA

SEQ ID NO: 2997 - protein, 8 aa, synthetic construct
GFIMDYYA

SEQ ID NO: 2998 - protein, 8 aa, synthetic construct
GFTLDYYA

SEQ ID NO: 2999 - protein, 8 aa, synthetic construct
GFTLDYYA

SEQ ID NO: 3000 - protein, 8 aa, synthetic construct
GFTLDYYA

SEQ ID NO: 3001 - protein, 8 aa, synthetic construct
GFTLDYYA

SEQ ID NO: 3002 - protein, 8 aa, synthetic construct
GFTLDYYS

SEQ ID NO: 3003 - protein, 8 aa, synthetic construct
GSTLDYYA

SEQ ID NO: 3004 - protein, 8 aa, synthetic construct
GFTLDYYA

SEQ ID NO: 3005 - protein, 8 aa, synthetic construct
GFTLDYYA

SEQ ID NO: 3006 - protein, 8 aa, synthetic construct
GFTLDYYA

SEQ ID NO: 3007 - protein, 8 aa, synthetic construct
GFTLDYYA

SEQ ID NO: 3008 - protein, 8 aa, synthetic construct
GFTLDYYA

SEQ ID NO: 3009 - protein, 8 aa, synthetic construct
GFTLDYYA

SEQ ID NO: 3010 - protein, 8 aa, synthetic construct
GFTLDYYA

SEQ ID NO: 3011 - protein, 8 aa, synthetic construct
GFTLDYYA

SEQ ID NO: 3012 - protein, 8 aa, synthetic construct
GFTLDYYA

SEQ ID NO: 3013 - protein, 8 aa, synthetic construct
GFTLDYYA

SEQ ID NO: 3014 - protein, 8 aa, synthetic construct
GFTLDYYA

SEQ ID NO: 3015 - protein, 8 aa, synthetic construct
GFTLDYYA

SEQ ID NO: 3016 - protein, 8 aa, synthetic construct
GFTLDYYA

SEQ ID NO: 3017 - protein, 8 aa, synthetic construct
GFTLDYYA

SEQ ID NO: 3018 - protein, 8 aa, synthetic construct
GFTLDYYA

SEQ ID NO: 3019 - protein, 8 aa, synthetic construct
GFTLDYYA

SEQ ID NO: 3020 - protein, 8 aa, synthetic construct
GFTLDYYA

SEQ ID NO: 3021 - protein, 6 aa, synthetic construct
GMPLVA

SEQ ID NO: 3022 - protein, 6 aa, synthetic construct
GIPLYA

SEQ ID NO: 3023 - protein, 8 aa, synthetic construct
GLFFAQTA

SEQ ID NO: 3024 - protein, 6 aa, synthetic construct
GMPSVA

SEQ ID NO: 3025 - protein, 6 aa, synthetic construct
GIPLVA

SEQ ID NO: 3026 - protein, 6 aa, synthetic construct
GIPLYA

SEQ ID NO: 3027 - protein, 6 aa, synthetic construct
GMPFVA

SEQ ID NO: 3028 - protein, 7 aa, synthetic construct
GIPFALA

SEQ ID NO: 3029 - protein, 6 aa, synthetic construct
GMPFVA

SEQ ID NO: 3030 - protein, 8 aa, synthetic construct
GIPSPLPA

SEQ ID NO: 3031 - protein, 6 aa, synthetic construct
GIPLYA

SEQ ID NO: 3032 - protein, 6 aa, synthetic construct
GMPFVA

SEQ ID NO: 3033 - protein, 8 aa, synthetic construct
GIPSPLPA

SEQ ID NO: 3034 - protein, 8 aa, synthetic construct
GIPFALAA

SEQ ID NO: 3035 - protein, 8 aa, synthetic construct
GIPFALPA

SEQ ID NO: 3036 - protein, 8 aa, synthetic construct
GMPFALTA

SEQ ID NO: 3037 - protein, 6 aa, synthetic construct
GMPLTA

SEQ ID NO: 3038 - protein, 8 aa, synthetic construct
GIPSPLPA

SEQ ID NO: 3039 - protein, 6 aa, synthetic construct
GMPAVA

SEQ ID NO: 3040 - protein, 8 aa, synthetic construct
GLFFAQTA

SEQ ID NO: 3041 - protein, 8 aa, synthetic construct
GIPFALTA

SEQ ID NO: 3042 - protein, 6 aa, synthetic construct
GMPFVA

SEQ ID NO: 3043 - protein, 8 aa, synthetic construct
GIPSPLPA

SEQ ID NO: 3044 - protein, 6 aa, synthetic construct
GMPAVA

SEQ ID NO: 3045 - protein, 6 aa, synthetic construct
GIPLYA

SEQ ID NO: 3046 - protein, 8 aa, synthetic construct
GIPSPLPA

SEQ ID NO: 3047 - protein, 6 aa, synthetic construct
GIPLVA

SEQ ID NO: 3048 - protein, 6 aa, synthetic construct
GIPLYA

SEQ ID NO: 3049 - protein, 5 aa, synthetic construct
GIPFA

SEQ ID NO: 3050 - protein, 6 aa, synthetic construct
GMPLVA

SEQ ID NO: 3051 - protein, 6 aa, synthetic construct
GIPLYA

SEQ ID NO: 3052 - protein, 6 aa, synthetic construct
GIPLYA

SEQ ID NO: 3053 - protein, 6 aa, synthetic construct
GMPSVA

SEQ ID NO: 3054 - protein, 6 aa, synthetic construct
GMPLVA

SEQ ID NO: 3055 - protein, 6 aa, synthetic construct
GIPLYA

SEQ ID NO: 3056 - protein, 6 aa, synthetic construct
GIPLYA

SEQ ID NO: 3057 - protein, 6 aa, synthetic construct
GMPLVA

SEQ ID NO: 3058 - protein, 6 aa, synthetic construct
GMPAVA

SEQ ID NO: 3059 - protein, 8 aa, synthetic construct
GIPFALPA

SEQ ID NO: 3060 - protein, 8 aa, synthetic construct
GIPFALTA

SEQ ID NO: 3061 - protein, 8 aa, synthetic construct
GIPFALPA

SEQ ID NO: 3062 - protein, 8 aa, synthetic construct
GIPFALPA

SEQ ID NO: 3063 - protein, 5 aa, synthetic construct
GIPFA

SEQ ID NO: 3064 - protein, 6 aa, synthetic construct
GIPLVA

SEQ ID NO: 3065 - protein, 8 aa, synthetic construct
GIPFALTA

SEQ ID NO: 3066 - protein, 6 aa, synthetic construct
GMPFVA

SEQ ID NO: 3067 - protein, 6 aa, synthetic construct
GIPLYA

SEQ ID NO: 3068 - protein, 6 aa, synthetic construct
GIPLYA

SEQ ID NO: 3069 - protein, 6 aa, synthetic construct
GMPFVA

SEQ ID NO: 3070 - protein, 8 aa, synthetic construct
GIPFALPA

SEQ ID NO: 3071 - protein, 8 aa, synthetic construct
GIPFALPA

SEQ ID NO: 3072 - protein, 6 aa, synthetic construct
GMPAVA

SEQ ID NO: 3073 - protein, 6 aa, synthetic construct
GIPLYA

SEQ ID NO: 3074 - protein, 6 aa, synthetic construct
GMPFVA

SEQ ID NO: 3075 - protein, 6 aa, synthetic construct
GIPLYA

SEQ ID NO: 3076 - protein, 6 aa, synthetic construct
GMPSVA

SEQ ID NO: 3077 - protein, 6 aa, synthetic construct
GMPLVA

SEQ ID NO: 3078 - protein, 6 aa, synthetic construct
GMPSVA

SEQ ID NO: 3079 - protein, 6 aa, synthetic construct
GMPAVA

SEQ ID NO: 3080 - protein, 8 aa, synthetic construct
GIPSPLPA

SEQ ID NO: 3081 - protein, 8 aa, synthetic construct
GKFFALAA

SEQ ID NO: 3082 - protein, 8 aa, synthetic construct
GIPSPLPA

SEQ ID NO: 3083 - protein, 8 aa, synthetic construct
GIPFALPA

SEQ ID NO: 3084 - protein, 8 aa, synthetic construct
GIPFALPA

SEQ ID NO: 3085 - protein, 6 aa, synthetic construct
GIPLVA

SEQ ID NO: 3086 - protein, 6 aa, synthetic construct
GMPLVA

SEQ ID NO: 3087 - protein, 6 aa, synthetic construct
GIPLYA

SEQ ID NO: 3088 - protein, 8 aa, synthetic construct
GMPFALTA

SEQ ID NO: 3089 - protein, 8 aa, synthetic construct
GMFFAQTA

SEQ ID NO: 3090 - protein, 8 aa, synthetic construct
GIPFALTA

SEQ ID NO: 3091 - protein, 8 aa, synthetic construct
GIPFALPA

SEQ ID NO: 3092 - protein, 8 aa, synthetic construct
GIPSPLPA

SEQ ID NO: 3093 - protein, 6 aa, synthetic construct
GIPLYA

SEQ ID NO: 3094 - protein, 6 aa, synthetic construct
GMPFVA

SEQ ID NO: 3095 - protein, 6 aa, synthetic construct
GIPLVA

SEQ ID NO: 3096 - protein, 8 aa, synthetic construct
GIPFALPA

SEQ ID NO: 3097 - protein, 8 aa, synthetic construct
GIPSPLPA

SEQ ID NO: 3098 - protein, 8 aa, synthetic construct
GIPSPLPA

SEQ ID NO: 3099 - protein, 6 aa, synthetic construct
GMPLVA

SEQ ID NO: 3100 - protein, 8 aa, synthetic construct
GIPSPLPA

SEQ ID NO: 3101 - protein, 8 aa, synthetic construct
GIPFALPA

SEQ ID NO: 3102 - protein, 6 aa, synthetic construct
GIPLYA

SEQ ID NO: 3103 - protein, 8 aa, synthetic construct
GIPFALAA

SEQ ID NO: 3104 - protein, 6 aa, synthetic construct
GMPFVA

SEQ ID NO: 3105 - protein, 8 aa, synthetic construct
GIPSPLPA

SEQ ID NO: 3106 - protein, 6 aa, synthetic construct
GMPFVA

SEQ ID NO: 3107 - protein, 8 aa, synthetic construct
GIPFALPA

SEQ ID NO: 3108 - protein, 8 aa, synthetic construct
GIPSPLPA

SEQ ID NO: 3109 - protein, 8 aa, synthetic construct
GIPFALPA

SEQ ID NO: 3110 - protein, 6 aa, synthetic construct
GMPLTA

SEQ ID NO: 3111 - protein, 8 aa, synthetic construct
GMFLALTA

SEQ ID NO: 3112 - protein, 6 aa, synthetic construct
GIPLYA

SEQ ID NO: 3113 - protein, 6 aa, synthetic construct
GIPLYA

SEQ ID NO: 3114 - protein, 8 aa, synthetic construct
GIPFALTA

SEQ ID NO: 3115 - protein, 6 aa, synthetic construct
GMPLVA

SEQ ID NO: 3116 - protein, 8 aa, synthetic construct
GIPSPLPA

SEQ ID NO: 3117 - protein, 8 aa, synthetic construct
GLFFAQTA

SEQ ID NO: 3118 - protein, 8 aa, synthetic construct
GIPSPLPA

SEQ ID NO: 3119 - protein, 8 aa, synthetic construct
GIPFALPA

SEQ ID NO: 3120 - protein, 6 aa, synthetic construct
GMPLVA

SEQ ID NO: 3121 - protein, 8 aa, synthetic construct
GIPFALPA

SEQ ID NO: 3122 - protein, 8 aa, synthetic construct
GIPFALPA

SEQ ID NO: 3123 - protein, 8 aa, synthetic construct
GIPFALPA

SEQ ID NO: 3124 - protein, 6 aa, synthetic construct
GIPLVA

SEQ ID NO: 3125 - protein, 8 aa, synthetic construct
GFTLDYYA

SEQ ID NO: 3126 - protein, 8 aa, synthetic construct
GFTLDYYA

SEQ ID NO: 3127 - protein, 8 aa, synthetic construct
ISRDGDST

SEQ ID NO: 3128 - protein, 8 aa, synthetic construct
ISTSGDST

SEQ ID NO: 3129 - protein, 8 aa, synthetic construct
ISRDGDST

SEQ ID NO: 3130 - protein, 8 aa, synthetic construct
ISRDGDST

SEQ ID NO: 3131 - protein, 8 aa, synthetic construct
ISSSGDST

SEQ ID NO: 3132 - protein, 8 aa, synthetic construct
ISRDGDST

SEQ ID NO: 3133 - protein, 8 aa, synthetic construct
ISSSGDST

SEQ ID NO: 3134 - protein, 8 aa, synthetic construct
ISSSGDST

SEQ ID NO: 3135 - protein, 8 aa, synthetic construct
ISRDADNT

SEQ ID NO: 3136 - protein, 8 aa, synthetic construct
ISVSGDST

SEQ ID NO: 3137 - protein, 8 aa, synthetic construct
ISRDGDST

SEQ ID NO: 3138 - protein, 8 aa, synthetic construct
ISSSGDAT

SEQ ID NO: 3139 - protein, 8 aa, synthetic construct
ISSSGDST

SEQ ID NO: 3140 - protein, 8 aa, synthetic construct
ISRDGDST

SEQ ID NO: 3141 - protein, 8 aa, synthetic construct
ISRDGDST

SEQ ID NO: 3142 - protein, 8 aa, synthetic construct
ISSSGDST

SEQ ID NO: 3143 - protein, 8 aa, synthetic construct
ISTSGDST

SEQ ID NO: 3144 - protein, 8 aa, synthetic construct
ISSSGDST

SEQ ID NO: 3145 - protein, 8 aa, synthetic construct
ISSSGDST

SEQ ID NO: 3146 - protein, 8 aa, synthetic construct
ISSSGDST

SEQ ID NO: 3147 - protein, 8 aa, synthetic construct
ISSSGDST

SEQ ID NO: 3148 - protein, 8 aa, synthetic construct
ISSSGDST

SEQ ID NO: 3149 - protein, 8 aa, synthetic construct
ISRDGDST

SEQ ID NO: 3150 - protein, 8 aa, synthetic construct
ISSSGDST

SEQ ID NO: 3151 - protein, 8 aa, synthetic construct
ISSSGDVT

SEQ ID NO: 3152 - protein, 8 aa, synthetic construct
ISSSGDST

SEQ ID NO: 3153 - protein, 8 aa, synthetic construct
ISSSGDST

SEQ ID NO: 3154 - protein, 8 aa, synthetic construct
ISSSGGST

SEQ ID NO: 3155 - protein, 8 aa, synthetic construct
ISSSGDST

SEQ ID NO: 3156 - protein, 8 aa, synthetic construct
ISSSGDST

SEQ ID NO: 3157 - protein, 8 aa, synthetic construct
ISSSGDST

SEQ ID NO: 3158 - protein, 8 aa, synthetic construct
ISSSGGST

SEQ ID NO: 3159 - protein, 8 aa, synthetic construct
ISSSGGST

SEQ ID NO: 3160 - protein, 8 aa, synthetic construct
ISSSGGNT

SEQ ID NO: 3161 - protein, 8 aa, synthetic construct
ISSSGGST

SEQ ID NO: 3162 - protein, 8 aa, synthetic construct
ISSSGDST

SEQ ID NO: 3163 - protein, 8 aa, synthetic construct
ISSSGDST

SEQ ID NO: 3164 - protein, 8 aa, synthetic construct
ISSSGDST

SEQ ID NO: 3165 - protein, 8 aa, synthetic construct
ISSSGDST

SEQ ID NO: 3166 - protein, 8 aa, synthetic construct
ISSSGGST

SEQ ID NO: 3167 - protein, 8 aa, synthetic construct
ISSSGGST

SEQ ID NO: 3168 - protein, 8 aa, synthetic construct
ISSSGGST

SEQ ID NO: 3169 - protein, 8 aa, synthetic construct
ISTSGDST

SEQ ID NO: 3170 - protein, 8 aa, synthetic construct
ISRDGGST

SEQ ID NO: 3171 - protein, 8 aa, synthetic construct
ISSSGGST

SEQ ID NO: 3172 - protein, 8 aa, synthetic construct
ISSSGGST

SEQ ID NO: 3173 - protein, 8 aa, synthetic construct
ISTSGDST

SEQ ID NO: 3174 - protein, 8 aa, synthetic construct
ISSSGGST

SEQ ID NO: 3175 - protein, 8 aa, synthetic construct
ISSSGDST

SEQ ID NO: 3176 - protein, 8 aa, synthetic construct
ISSSGGST

SEQ ID NO: 3177 - protein, 8 aa, synthetic construct
ISSSGGST

SEQ ID NO: 3178 - protein, 8 aa, synthetic construct
ISSSGGST

SEQ ID NO: 3179 - protein, 8 aa, synthetic construct
ISSSGGST

SEQ ID NO: 3180 - protein, 8 aa, synthetic construct
ISSSGGST

SEQ ID NO: 3181 - protein, 8 aa, synthetic construct
ISSSGDST

SEQ ID NO: 3182 - protein, 8 aa, synthetic construct
ISSSGDST

SEQ ID NO: 3183 - protein, 8 aa, synthetic construct
ISSSGGST

SEQ ID NO: 3184 - protein, 8 aa, synthetic construct
ISSSGGST

SEQ ID NO: 3185 - protein, 8 aa, synthetic construct
ISSSGGST

SEQ ID NO: 3186 - protein, 8 aa, synthetic construct
ISSSGGST

SEQ ID NO: 3187 - protein, 8 aa, synthetic construct
ISSSGGST

SEQ ID NO: 3188 - protein, 12 aa, synthetic construct
IRTEISSTGDTT

SEQ ID NO: 3189 - protein, 8 aa, synthetic construct
ISSSGGST

SEQ ID NO: 3190 - protein, 8 aa, synthetic construct
ISSSGGST

SEQ ID NO: 3191 - protein, 8 aa, synthetic construct
ISSSGGST

SEQ ID NO: 3192 - protein, 8 aa, synthetic construct
ISSSGDST

SEQ ID NO: 3193 - protein, 8 aa, synthetic construct
ISSSGDST

SEQ ID NO: 3194 - protein, 8 aa, synthetic construct
ISSSGGST

SEQ ID NO: 3195 - protein, 8 aa, synthetic construct
ISSSGGST

SEQ ID NO: 3196 - protein, 8 aa, synthetic construct
ISSSGGST

SEQ ID NO: 3197 - protein, 8 aa, synthetic construct
ISSSGGST

SEQ ID NO: 3198 - protein, 8 aa, synthetic construct
ISSSGGNT

SEQ ID NO: 3199 - protein, 8 aa, synthetic construct
ISSSGGST

SEQ ID NO: 3200 - protein, 8 aa, synthetic construct
ISSSGGST

SEQ ID NO: 3201 - protein, 8 aa, synthetic construct
ISSSGGST

SEQ ID NO: 3202 - protein, 8 aa, synthetic construct
ISSSGGST

SEQ ID NO: 3203 - protein, 8 aa, synthetic construct
ISSSGDST

SEQ ID NO: 3204 - protein, 8 aa, synthetic construct
ISSSGGST

SEQ ID NO: 3205 - protein, 8 aa, synthetic construct
ISSSGDST

SEQ ID NO: 3206 - protein, 8 aa, synthetic construct
ISSSGGST

SEQ ID NO: 3207 - protein, 8 aa, synthetic construct
ISRDGGST

SEQ ID NO: 3208 - protein, 8 aa, synthetic construct
ISTSGDST

SEQ ID NO: 3209 - protein, 8 aa, synthetic construct
ISSSGGST

SEQ ID NO: 3210 - protein, 8 aa, synthetic construct
ISSSGGST

SEQ ID NO: 3211 - protein, 8 aa, synthetic construct
ISSSGGST

SEQ ID NO: 3212 - protein, 8 aa, synthetic construct
ISSSGGST

SEQ ID NO: 3213 - protein, 8 aa, synthetic construct
ISSSGGST

SEQ ID NO: 3214 - protein, 8 aa, synthetic construct
ISSSGGNT

SEQ ID NO: 3215 - protein, 8 aa, synthetic construct
ISSSGGST

SEQ ID NO: 3216 - protein, 8 aa, synthetic construct
ISSSGDST

SEQ ID NO: 3217 - protein, 8 aa, synthetic construct
ISSSGDST

SEQ ID NO: 3218 - protein, 12 aa, synthetic construct
IRTEISSTGDTT

SEQ ID NO: 3219 - protein, 8 aa, synthetic construct
ISSSGDST

SEQ ID NO: 3220 - protein, 8 aa, synthetic construct
ISSSGDST

SEQ ID NO: 3221 - protein, 8 aa, synthetic construct
ISSSGGST

SEQ ID NO: 3222 - protein, 8 aa, synthetic construct
ISRDGGST

SEQ ID NO: 3223 - protein, 8 aa, synthetic construct
ISSSGGST

SEQ ID NO: 3224 - protein, 8 aa, synthetic construct
ISSSGGST

SEQ ID NO: 3225 - protein, 8 aa, synthetic construct
ISTSGDST

SEQ ID NO: 3226 - protein, 8 aa, synthetic construct
ISSSGGST

SEQ ID NO: 3227 - protein, 8 aa, synthetic construct
ISSSGGST

SEQ ID NO: 3228 - protein, 8 aa, synthetic construct
ISSSGGST

SEQ ID NO: 3229 - protein, 8 aa, synthetic construct
ISSSGDST

SEQ ID NO: 3230 - protein, 8 aa, synthetic construct
ISSSGGST

SEQ ID NO: 3231 - protein, 8 aa, synthetic construct
ISSSGGST

SEQ ID NO: 3232 - protein, 12 aa, synthetic construct
IRTEISSTGDTT

SEQ ID NO: 3233 - protein, 8 aa, synthetic construct
ISSSGGRT

SEQ ID NO: 3234 - protein, 8 aa, synthetic construct
ISSSGGST

SEQ ID NO: 3235 - protein, 8 aa, synthetic construct
ISSSGGST

SEQ ID NO: 3236 - protein, 8 aa, synthetic construct
ISSSGGST

SEQ ID NO: 3237 - protein, 8 aa, synthetic construct
ISSSGGST

SEQ ID NO: 3238 - protein, 8 aa, synthetic construct
ISSSGGST

SEQ ID NO: 3239 - protein, 8 aa, synthetic construct
ISSSGDST

SEQ ID NO: 3240 - protein, 8 aa, synthetic construct
ISSSGDST

SEQ ID NO: 3241 - protein, 8 aa, synthetic construct
ISSSGGST

SEQ ID NO: 3242 - protein, 12 aa, synthetic construct
IRTEISSTGDTT

SEQ ID NO: 3243 - protein, 8 aa, synthetic construct
ISSSGDST

SEQ ID NO: 3244 - protein, 8 aa, synthetic construct
ISSSGDST

SEQ ID NO: 3245 - protein, 8 aa, synthetic construct
ISSSGGST

SEQ ID NO: 3246 - protein, 8 aa, synthetic construct
ISSSGGST

SEQ ID NO: 3247 - protein, 8 aa, synthetic construct
ISSSGGST

SEQ ID NO: 3248 - protein, 8 aa, synthetic construct
ISSSGGST

SEQ ID NO: 3249 - protein, 8 aa, synthetic construct
ISSSGGST

SEQ ID NO: 3250 - protein, 8 aa, synthetic construct
ISSSGDST

SEQ ID NO: 3251 - protein, 8 aa, synthetic construct
ISSSGGST

SEQ ID NO: 3252 - protein, 8 aa, synthetic construct
ISSSGGST

SEQ ID NO: 3253 - protein, 8 aa, synthetic construct
ISSSGDST

SEQ ID NO: 3254 - protein, 8 aa, synthetic construct
ISSSGGST

SEQ ID NO: 3255 - protein, 8 aa, synthetic construct
ISTSGDST

SEQ ID NO: 3256 - protein, 8 aa, synthetic construct
ISTSGDST

SEQ ID NO: 3257 - protein, 8 aa, synthetic construct
ISSSGGST

SEQ ID NO: 3258 - protein, 8 aa, synthetic construct
ISSSGGST

SEQ ID NO: 3259 - protein, 8 aa, synthetic construct
ISSSGGST

SEQ ID NO: 3260 - protein, 8 aa, synthetic construct
ISSSGGST

SEQ ID NO: 3261 - protein, 8 aa, synthetic construct
ISSSGGST

SEQ ID NO: 3262 - protein, 8 aa, synthetic construct
ISSSGGST

SEQ ID NO: 3263 - protein, 8 aa, synthetic construct
ISSSGGST

SEQ ID NO: 3264 - protein, 12 aa, synthetic construct
IRTEISSTGDTT

SEQ ID NO: 3265 - protein, 8 aa, synthetic construct
ISSSGDST

SEQ ID NO: 3266 - protein, 8 aa, synthetic construct
ISSSGGST

SEQ ID NO: 3267 - protein, 8 aa, synthetic construct
ISTSGDST

SEQ ID NO: 3268 - protein, 8 aa, synthetic construct
ISSSGGST

SEQ ID NO: 3269 - protein, 8 aa, synthetic construct
ISSSGDST

SEQ ID NO: 3270 - protein, 8 aa, synthetic construct
ISSSGGST

SEQ ID NO: 3271 - protein, 8 aa, synthetic construct
ISSSGGST

SEQ ID NO: 3272 - protein, 8 aa, synthetic construct
ISSSGGST

SEQ ID NO: 3273 - protein, 8 aa, synthetic construct
ISSSGGST

SEQ ID NO: 3274 - protein, 8 aa, synthetic construct
ISSSGGST

SEQ ID NO: 3275 - protein, 8 aa, synthetic construct
ISSSGGST

SEQ ID NO: 3276 - protein, 8 aa, synthetic construct
ISSSGGST

SEQ ID NO: 3277 - protein, 8 aa, synthetic construct
ISSSGGST

SEQ ID NO: 3278 - protein, 8 aa, synthetic construct
ISSSGDST

SEQ ID NO: 3279 - protein, 8 aa, synthetic construct
ISSSGGST

SEQ ID NO: 3280 - protein, 8 aa, synthetic construct
ISSSGGST

SEQ ID NO: 3281 - protein, 8 aa, synthetic construct
ISSSGGST

SEQ ID NO: 3282 - protein, 8 aa, synthetic construct
ISSSGGST

SEQ ID NO: 3283 - protein, 8 aa, synthetic construct
ISTSGDST

SEQ ID NO: 3284 - protein, 8 aa, synthetic construct
ISSSGGST

SEQ ID NO: 3285 - protein, 8 aa, synthetic construct
ISSSGDST

SEQ ID NO: 3286 - protein, 8 aa, synthetic construct
ISSSGGST

SEQ ID NO: 3287 - protein, 8 aa, synthetic construct
ISRDGGST

SEQ ID NO: 3288 - protein, 8 aa, synthetic construct
ISSSGDST

SEQ ID NO: 3289 - protein, 8 aa, synthetic construct
ISSSGGST

SEQ ID NO: 3290 - protein, 12 aa, synthetic construct
IRTEISSTGDTT

SEQ ID NO: 3291 - protein, 8 aa, synthetic construct
ISSSGGST

SEQ ID NO: 3292 - protein, 8 aa, synthetic construct
ISSSGDST

SEQ ID NO: 3293 - protein, 8 aa, synthetic construct
ISSSGDST

SEQ ID NO: 3294 - protein, 8 aa, synthetic construct
ISSSGGST

SEQ ID NO: 3295 - protein, 12 aa, synthetic construct
IRTEISSTGDTT

SEQ ID NO: 3296 - protein, 8 aa, synthetic construct
ISSSGGST

SEQ ID NO: 3297 - protein, 8 aa, synthetic construct
ISTSGDST

SEQ ID NO: 3298 - protein, 8 aa, synthetic construct
ISSSGDST

SEQ ID NO: 3299 - protein, 8 aa, synthetic construct
ISSSGGST

SEQ ID NO: 3300 - protein, 8 aa, synthetic construct
ISSSGDST

SEQ ID NO: 3301 - protein, 8 aa, synthetic construct
ISTSGDST

SEQ ID NO: 3302 - protein, 8 aa, synthetic construct
ISSSGDST

SEQ ID NO: 3303 - protein, 8 aa, synthetic construct
ISSSGDST

SEQ ID NO: 3304 - protein, 8 aa, synthetic construct
ISSSGGST

SEQ ID NO: 3305 - protein, 8 aa, synthetic construct
ISSSGGST

SEQ ID NO: 3306 - protein, 8 aa, synthetic construct
ISSSGGST

SEQ ID NO: 3307 - protein, 8 aa, synthetic construct
ISSSGGST

SEQ ID NO: 3308 - protein, 8 aa, synthetic construct
ISSSGDST

SEQ ID NO: 3309 - protein, 8 aa, synthetic construct
ISSSGGST

SEQ ID NO: 3310 - protein, 8 aa, synthetic construct
ISSSGGST

SEQ ID NO: 3311 - protein, 8 aa, synthetic construct
ISTSGDST

SEQ ID NO: 3312 - protein, 8 aa, synthetic construct
ISSSGGST

SEQ ID NO: 3313 - protein, 8 aa, synthetic construct
ISSSGGST

SEQ ID NO: 3314 - protein, 8 aa, synthetic construct
ISSSGGST

SEQ ID NO: 3315 - protein, 8 aa, synthetic construct
ISSSGGST

SEQ ID NO: 3316 - protein, 8 aa, synthetic construct
ISSSGGST

SEQ ID NO: 3317 - protein, 7 aa, synthetic construct
ISSGGNT

SEQ ID NO: 3318 - protein, 7 aa, synthetic construct
ISSGGNA

SEQ ID NO: 3319 - protein, 7 aa, synthetic construct
ISSSGQT

SEQ ID NO: 3320 - protein, 7 aa, synthetic construct
ISSGGNT

SEQ ID NO: 3321 - protein, 7 aa, synthetic construct
ISSGGNT

SEQ ID NO: 3322 - protein, 7 aa, synthetic construct
ISSGGNT

SEQ ID NO: 3323 - protein, 7 aa, synthetic construct
ISTGGNT

SEQ ID NO: 3324 - protein, 7 aa, synthetic construct
ISSGGNT

SEQ ID NO: 3325 - protein, 7 aa, synthetic construct
IGSGGDT

SEQ ID NO: 3326 - protein, 7 aa, synthetic construct
ISSGGNT

SEQ ID NO: 3327 - protein, 7 aa, synthetic construct
ISSGGNT

SEQ ID NO: 3328 - protein, 7 aa, synthetic construct
ISSGGNT

SEQ ID NO: 3329 - protein, 7 aa, synthetic construct
ISSGGNT

SEQ ID NO: 3330 - protein, 7 aa, synthetic construct
ISSGGNT

SEQ ID NO: 3331 - protein, 7 aa, synthetic construct
ISSGGDT

SEQ ID NO: 3332 - protein, 7 aa, synthetic construct
ISSGGNT

SEQ ID NO: 3333 - protein, 7 aa, synthetic construct
ISSGGNT

SEQ ID NO: 3334 - protein, 7 aa, synthetic construct
ISSGGNT

SEQ ID NO: 3335 - protein, 7 aa, synthetic construct
ISSGDNT

SEQ ID NO: 3336 - protein, 7 aa, synthetic construct
ISSSGQT

SEQ ID NO: 3337 - protein, 7 aa, synthetic construct
ISSGGDT

SEQ ID NO: 3338 - protein, 7 aa, synthetic construct
ISSGGAT

SEQ ID NO: 3339 - protein, 7 aa, synthetic construct
ISSAGNT

SEQ ID NO: 3340 - protein, 7 aa, synthetic construct
ISSGGNT

SEQ ID NO: 3341 - protein, 7 aa, synthetic construct
ISSGGNT

SEQ ID NO: 3342 - protein, 7 aa, synthetic construct
ISSAGNT

SEQ ID NO: 3343 - protein, 7 aa, synthetic construct
ISSGGNT

SEQ ID NO: 3344 - protein, 7 aa, synthetic construct
ISSGGNT

SEQ ID NO: 3345 - protein, 7 aa, synthetic construct
ISSGGNT

SEQ ID NO: 3346 - protein, 7 aa, synthetic construct
ISSGGNT

SEQ ID NO: 3347 - protein, 7 aa, synthetic construct
ISSGGNT

SEQ ID NO: 3348 - protein, 7 aa, synthetic construct
ISSGGNT

SEQ ID NO: 3349 - protein, 7 aa, synthetic construct
IGSGGDT

SEQ ID NO: 3350 - protein, 7 aa, synthetic construct
ISSGGNT

SEQ ID NO: 3351 - protein, 7 aa, synthetic construct
ISSGGNT

SEQ ID NO: 3352 - protein, 7 aa, synthetic construct
ISSGGNT

SEQ ID NO: 3353 - protein, 7 aa, synthetic construct
ISSGGNT

SEQ ID NO: 3354 - protein, 7 aa, synthetic construct
ISSGGNT

SEQ ID NO: 3355 - protein, 7 aa, synthetic construct
ISSGGNT

SEQ ID NO: 3356 - protein, 7 aa, synthetic construct
ISSGGDI

SEQ ID NO: 3357 - protein, 7 aa, synthetic construct
ISSGGNT

SEQ ID NO: 3358 - protein, 7 aa, synthetic construct
ISSGGNT

SEQ ID NO: 3359 - protein, 7 aa, synthetic construct
ISSGGNT

SEQ ID NO: 3360 - protein, 7 aa, synthetic construct
ISSGGNT

SEQ ID NO: 3361 - protein, 7 aa, synthetic construct
ISSGANT

SEQ ID NO: 3362 - protein, 7 aa, synthetic construct
ISSGGDT

SEQ ID NO: 3363 - protein, 7 aa, synthetic construct
ISSGGNT

SEQ ID NO: 3364 - protein, 7 aa, synthetic construct
ISSGGNT

SEQ ID NO: 3365 - protein, 7 aa, synthetic construct
ISSGGDT

SEQ ID NO: 3366 - protein, 7 aa, synthetic construct
ISSGGNT

SEQ ID NO: 3367 - protein, 7 aa, synthetic construct
ISSVGNT

SEQ ID NO: 3368 - protein, 7 aa, synthetic construct
ISSGDNT

SEQ ID NO: 3369 - protein, 7 aa, synthetic construct
ISSGGNT

SEQ ID NO: 3370 - protein, 7 aa, synthetic construct
ISTGGNT

SEQ ID NO: 3371 - protein, 7 aa, synthetic construct
ISSGGNT

SEQ ID NO: 3372 - protein, 7 aa, synthetic construct
ISSGGNT

SEQ ID NO: 3373 - protein, 7 aa, synthetic construct
ISSGGNT

SEQ ID NO: 3374 - protein, 7 aa, synthetic construct
ISSGGNT

SEQ ID NO: 3375 - protein, 7 aa, synthetic construct
ISSGGNT

SEQ ID NO: 3376 - protein, 7 aa, synthetic construct
ISSGGNT

SEQ ID NO: 3377 - protein, 7 aa, synthetic construct
ISSGSNT

SEQ ID NO: 3378 - protein, 7 aa, synthetic construct
ISSGGNT

SEQ ID NO: 3379 - protein, 7 aa, synthetic construct
ISSGGNT

SEQ ID NO: 3380 - protein, 7 aa, synthetic construct
ISSGGNT

SEQ ID NO: 3381 - protein, 7 aa, synthetic construct
ISSGGNT

SEQ ID NO: 3382 - protein, 7 aa, synthetic construct
ISSGGNT

SEQ ID NO: 3383 - protein, 7 aa, synthetic construct
ISSGGNT

SEQ ID NO: 3384 - protein, 7 aa, synthetic construct
ISSGGNT

SEQ ID NO: 3385 - protein, 7 aa, synthetic construct
ISSGSNT

SEQ ID NO: 3386 - protein, 7 aa, synthetic construct
ISSAGNT

SEQ ID NO: 3387 - protein, 7 aa, synthetic construct
ISSGGNT

SEQ ID NO: 3388 - protein, 7 aa, synthetic construct
ISSGGNT

SEQ ID NO: 3389 - protein, 7 aa, synthetic construct
ISRGGNT

SEQ ID NO: 3390 - protein, 7 aa, synthetic construct
ISTGGNT

SEQ ID NO: 3391 - protein, 7 aa, synthetic construct
ISSGGNT

SEQ ID NO: 3392 - protein, 7 aa, synthetic construct
IGSVGNT

SEQ ID NO: 3393 - protein, 7 aa, synthetic construct
ISSVDNT

SEQ ID NO: 3394 - protein, 7 aa, synthetic construct
ISSVDNT

SEQ ID NO: 3395 - protein, 7 aa, synthetic construct
ISSGGNT

SEQ ID NO: 3396 - protein, 7 aa, synthetic construct
ISSVDST

SEQ ID NO: 3397 - protein, 7 aa, synthetic construct
IGSGGDT

SEQ ID NO: 3398 - protein, 7 aa, synthetic construct
ISSGGNT

SEQ ID NO: 3399 - protein, 7 aa, synthetic construct
ISSGGNT

SEQ ID NO: 3400 - protein, 7 aa, synthetic construct
ISSGGNT

SEQ ID NO: 3401 - protein, 7 aa, synthetic construct
ISSGGNT

SEQ ID NO: 3402 - protein, 7 aa, synthetic construct
ISSGGNT

SEQ ID NO: 3403 - protein, 7 aa, synthetic construct
ISSGGDT

SEQ ID NO: 3404 - protein, 7 aa, synthetic construct
ISSGGNT

SEQ ID NO: 3405 - protein, 7 aa, synthetic construct
ISSGGNT

SEQ ID NO: 3406 - protein, 7 aa, synthetic construct
ISSGGNT

SEQ ID NO: 3407 - protein, 7 aa, synthetic construct
ISSSSDT

SEQ ID NO: 3408 - protein, 7 aa, synthetic construct
ISSGGNT

SEQ ID NO: 3409 - protein, 7 aa, synthetic construct
ISSGGNT

SEQ ID NO: 3410 - protein, 7 aa, synthetic construct
ISSAGNT

SEQ ID NO: 3411 - protein, 7 aa, synthetic construct
ISSGGNT

SEQ ID NO: 3412 - protein, 7 aa, synthetic construct
ISSAGNT

SEQ ID NO: 3413 - protein, 7 aa, synthetic construct
ISSSGQT

SEQ ID NO: 3414 - protein, 7 aa, synthetic construct
ISSAGNT

SEQ ID NO: 3415 - protein, 7 aa, synthetic construct
ISSGGNT

SEQ ID NO: 3416 - protein, 7 aa, synthetic construct
ISSGGNT

SEQ ID NO: 3417 - protein, 7 aa, synthetic construct
ISSGGNT

SEQ ID NO: 3418 - protein, 7 aa, synthetic construct
ISSGGNT

SEQ ID NO: 3419 - protein, 7 aa, synthetic construct
ISPGGNT

SEQ ID NO: 3420 - protein, 7 aa, synthetic construct
ISSGGNT

SEQ ID NO: 3421 - protein, 8 aa, synthetic construct
ISSTDGRT

SEQ ID NO: 3422 - protein, 8 aa, synthetic construct
ISSTDGRT

SEQ ID NO: 3423 - protein, 20 aa, synthetic construct
AAYVYPDYYCSEYVLLKYDY

SEQ ID NO: 3424 - protein, 20 aa, synthetic construct
AAYVYPDYYCSEYVLLRYDY

SEQ ID NO: 3425 - protein, 20 aa, synthetic construct
AAYVYPDYYCSEYVLLKYDY

SEQ ID NO: 3426 - protein, 20 aa, synthetic construct
AAYVYPDYYCSEYVPLKYDY

SEQ ID NO: 3427 - protein, 20 aa, synthetic construct
AAYVYPDYYCSEYVLLKYDY

SEQ ID NO: 3428 - protein, 20 aa, synthetic construct
AAYVYPDYYCSEYVLLKYDY

SEQ ID NO: 3429 - protein, 20 aa, synthetic construct
AAYVYPDYYCSEYVLLRYDY

SEQ ID NO: 3430 - protein, 20 aa, synthetic construct
AAYVYPDYYCSEYILSKYDY

SEQ ID NO: 3431 - protein, 20 aa, synthetic construct
AAYVYPDYYCSDYVLLKYDY

SEQ ID NO: 3432 - protein, 20 aa, synthetic construct
AAYVYPDYYCSEYVLLKYDY

SEQ ID NO: 3433 - protein, 20 aa, synthetic construct
AAYVYPDYYCSEYVLLKYDY

SEQ ID NO: 3434 - protein, 20 aa, synthetic construct
AAYVYPDYYCSEYVLLKYDY

SEQ ID NO: 3435 - protein, 20 aa, synthetic construct
AAYVYPDYYCSEYVLLKYDY

SEQ ID NO: 3436 - protein, 20 aa, synthetic construct
AAYVYPDYYCSEYVLLKYDY

SEQ ID NO: 3437 - protein, 20 aa, synthetic construct
AAYVYPDYYCSEYVLLKYDY

SEQ ID NO: 3438 - protein, 20 aa, synthetic construct
AAYVYPDYYCSEYVKLKYDY

SEQ ID NO: 3439 - protein, 20 aa, synthetic construct
AAYVYPDYYCSDYVLLKYDY

SEQ ID NO: 3440 - protein, 20 aa, synthetic construct
AAYVYPDYYCSEYVLLKYDY

SEQ ID NO: 3441 - protein, 20 aa, synthetic construct
AAYVYPDYYCSEYVLLKYDY

SEQ ID NO: 3442 - protein, 20 aa, synthetic construct
AAYVYPDYYCSEYVLLKYDY

SEQ ID NO: 3443 - protein, 20 aa, synthetic construct
AAYVYPDYYCSEYVLLKYDY

SEQ ID NO: 3444 - protein, 20 aa, synthetic construct
AAYVYPDYYCSEYVKLKYDY

SEQ ID NO: 3445 - protein, 20 aa, synthetic construct
AAYVYPDYYCSEYVLLKYDY

SEQ ID NO: 3446 - protein, 20 aa, synthetic construct
AAYVYPDYYCSEYVLLKYDY

SEQ ID NO: 3447 - protein, 20 aa, synthetic construct
AAYVYPDYYCSEYVLLKYDY

SEQ ID NO: 3448 - protein, 20 aa, synthetic construct
AAYVYPDYYCSEYILLKYDY

SEQ ID NO: 3449 - protein, 20 aa, synthetic construct
AAYVYPDYYCSEYVLLKYDY

SEQ ID NO: 3450 - protein, 20 aa, synthetic construct
AAYVYPDYYCSEYVKLKYDY

SEQ ID NO: 3451 - protein, 20 aa, synthetic construct
AAYVYPDYYCSEYVKLKYDY

SEQ ID NO: 3452 - protein, 20 aa, synthetic construct
AAYVYPDYYCSEYVKLKYDY

SEQ ID NO: 3453 - protein, 20 aa, synthetic construct
AAYVYPDYYCSDYVLLKYDY

SEQ ID NO: 3454 - protein, 20 aa, synthetic construct
AAYVYPDYYCSDYVLLKYDY

SEQ ID NO: 3455 - protein, 20 aa, synthetic construct
AAYVYPDYYCSDYDLLRYDY

SEQ ID NO: 3456 - protein, 20 aa, synthetic construct
AAYVYPDYYCSDYVLLKYDY

SEQ ID NO: 3457 - protein, 20 aa, synthetic construct
AAYVYPDYYCSDYDLLRYDY

SEQ ID NO: 3458 - protein, 20 aa, synthetic construct
AAYVYPDYYCSGYVLLEYDY

SEQ ID NO: 3459 - protein, 20 aa, synthetic construct
AAYVYPDYYCSGYVLLEYDY

SEQ ID NO: 3460 - protein, 20 aa, synthetic construct
AAYVYPDYYCSEYVLSKYDY

SEQ ID NO: 3461 - protein, 20 aa, synthetic construct
AAYVYPDYYCSGYVLLEYDY

SEQ ID NO: 3462 - protein, 20 aa, synthetic construct
AAYVYPDYYCSDYVLSRYDY

SEQ ID NO: 3463 - protein, 20 aa, synthetic construct
AAYVYPDYYCSEYVLLRYDY

SEQ ID NO: 3464 - protein, 20 aa, synthetic construct
AAYVYPDYYCSDYVLLRYDY

SEQ ID NO: 3465 - protein, 20 aa, synthetic construct
AAYVYPDYYCSDYVLSRYDY

SEQ ID NO: 3466 - protein, 20 aa, synthetic construct
AAYVYPDYYCSEYVLLRYDY

SEQ ID NO: 3467 - protein, 20 aa, synthetic construct
AAYVYPDYYCSDYDLLRYDY

SEQ ID NO: 3468 - protein, 20 aa, synthetic construct
AAYVYPDYYCSDYVPLRYDY

SEQ ID NO: 3469 - protein, 20 aa, synthetic construct
AAYVYPDYYCSDYVPLRYDY

SEQ ID NO: 3470 - protein, 20 aa, synthetic construct
AAYVYPEYYCSEYVPLRYDY

SEQ ID NO: 3471 - protein, 20 aa, synthetic construct
AAYVYPDYYCSEYALLKYDY

SEQ ID NO: 3472 - protein, 20 aa, synthetic construct
AAYVDPDYYCSEYVLLKYDY

SEQ ID NO: 3473 - protein, 20 aa, synthetic construct
AAYDYPDYYCSEYVLLKYDY

SEQ ID NO: 3474 - protein, 20 aa, synthetic construct
AAYVYPDDYCSEYVLLKYDY

SEQ ID NO: 3475 - protein, 20 aa, synthetic construct
AAYVYPDYDCSEYVLLKYDY

SEQ ID NO: 3476 - protein, 20 aa, synthetic construct
AAYVYPDYYCSEYALLKYDY

SEQ ID NO: 3477 - protein, 20 aa, synthetic construct
AAYVYPDYYCSDYVLSRYDY

SEQ ID NO: 3478 - protein, 20 aa, synthetic construct
AAYVYPDYYCSEYALLKYDY

SEQ ID NO: 3479 - protein, 20 aa, synthetic construct
AAYVYPDYYCSEYALFRYDY

SEQ ID NO: 3480 - protein, 20 aa, synthetic construct
AAYVYPDYFCSEYDLLRYDY

SEQ ID NO: 3481 - protein, 20 aa, synthetic construct
AAYVYPDHYCSEYVLLKYDY

SEQ ID NO: 3482 - protein, 20 aa, synthetic construct
AAYVYPEYYCSEYVLLKYDY

SEQ ID NO: 3483 - protein, 20 aa, synthetic construct
AAYVYPDYYCSEYALSRYDY

SEQ ID NO: 3484 - protein, 20 aa, synthetic construct
AAYVYPDYYCSEYVLSRYDH

SEQ ID NO: 3485 - protein, 20 aa, synthetic construct
AAYVYPDDYCSEYVPLRYDY

SEQ ID NO: 3486 - protein, 20 aa, synthetic construct
AASVYPDYYCSEYVLLKYDY

SEQ ID NO: 3487 - protein, 20 aa, synthetic construct
AAYVYPDYYCSEYVLSKYDY

SEQ ID NO: 3488 - protein, 20 aa, synthetic construct
AAYVYPDHYCSEYVLLKYDY

SEQ ID NO: 3489 - protein, 20 aa, synthetic construct
AAYVYPDYYCSEYVLSKYDY

SEQ ID NO: 3490 - protein, 20 aa, synthetic construct
AAYVYPDYYCPEYVLSRYDY

SEQ ID NO: 3491 - protein, 20 aa, synthetic construct
AAYVYPDYYCSDYDLLRYDY

SEQ ID NO: 3492 - protein, 20 aa, synthetic construct
AAYAYPDYYCSEYVLLKYDY

SEQ ID NO: 3493 - protein, 20 aa, synthetic construct
AAYVSPDYYCSEYVLLKYDY

SEQ ID NO: 3494 - protein, 20 aa, synthetic construct
AAYAYPDYYCSDYVLFKYDY

SEQ ID NO: 3495 - protein, 20 aa, synthetic construct
AAYVYPDYYCSEYIPLRYDY

SEQ ID NO: 3496 - protein, 20 aa, synthetic construct
AAYVYPDYYCSEYVLIKYDY

SEQ ID NO: 3497 - protein, 20 aa, synthetic construct
AAYVYPYYYCSEYVLLKYDY

SEQ ID NO: 3498 - protein, 20 aa, synthetic construct
AASVYPDYYCSDYVLLRYDY

SEQ ID NO: 3499 - protein, 20 aa, synthetic construct
AAYVYPDYYCSEYVLLKYDH

SEQ ID NO: 3500 - protein, 20 aa, synthetic construct
AAYVYPDYYCTEYVLLKYDY

SEQ ID NO: 3501 - protein, 20 aa, synthetic construct
AAYVYSDYYCSDYVLLRYDY

SEQ ID NO: 3502 - protein, 20 aa, synthetic construct
AAYVYPEYYCSEYVLSRYDY

SEQ ID NO: 3503 - protein, 20 aa, synthetic construct
AAYVYPDYYCTEYVQLRYDY

SEQ ID NO: 3504 - protein, 20 aa, synthetic construct
AAYVYPDYYCSDYVQLRYDY

SEQ ID NO: 3505 - protein, 20 aa, synthetic construct
AAYVDPDYYCSEYVPLRYDY

SEQ ID NO: 3506 - protein, 20 aa, synthetic construct
AAYVYTDYYCSDYVLLRYDY

SEQ ID NO: 3507 - protein, 20 aa, synthetic construct
AAYVYPDYYCSEYVLLKYAY

SEQ ID NO: 3508 - protein, 20 aa, synthetic construct
AAYVYPDYYCSEYVLLKYDH

SEQ ID NO: 3509 - protein, 20 aa, synthetic construct
AAYVYSDYYCSEYVLSRYDY

SEQ ID NO: 3510 - protein, 20 aa, synthetic construct
ATYVYPDYYCSDYVLSKYDY

SEQ ID NO: 3511 - protein, 20 aa, synthetic construct
AAYVYPEYYCSDYVLLRYDY

SEQ ID NO: 3512 - protein, 20 aa, synthetic construct
AVYVYPDYYCSEYVLLKYDY

SEQ ID NO: 3513 - protein, 20 aa, synthetic construct
AAYVYPEYYCSEYVLLKYDY

SEQ ID NO: 3514 - protein, 20 aa, synthetic construct
AAYVYPEYYCSEYVLSRYDY

SEQ ID NO: 3515 - protein, 20 aa, synthetic construct
AAYVYPEYYCSEYVLLKYDY

SEQ ID NO: 3516 - protein, 20 aa, synthetic construct
AAYVDPDYYCSEYVLLKYDY

SEQ ID NO: 3517 - protein, 20 aa, synthetic construct
AAYVYPDYYCSDYDLSRYDH

SEQ ID NO: 3518 - protein, 20 aa, synthetic construct
AAYVYPDNYCSEYILLRYDY

SEQ ID NO: 3519 - protein, 20 aa, synthetic construct
AAYVYPDFYCSEYVPLRYDY

SEQ ID NO: 3520 - protein, 20 aa, synthetic construct
AAYVYPDDYCSEYVLSRYDY

SEQ ID NO: 3521 - protein, 20 aa, synthetic construct
AAYVYPDYYCSDYVLLRHDY

SEQ ID NO: 3522 - protein, 20 aa, synthetic construct
AAYVYPDYYCSDYVLLRHDY

SEQ ID NO: 3523 - protein, 20 aa, synthetic construct
AAFVYPDYYCSDYVLLRYDY

SEQ ID NO: 3524 - protein, 20 aa, synthetic construct
AAYVYPDDSCSEYVLLRYDY

SEQ ID NO: 3525 - protein, 20 aa, synthetic construct
AAYVYPDYYCSDYVLLRHDY

SEQ ID NO: 3526 - protein, 20 aa, synthetic construct
AAYVYHDYYCSDYVLLRYDY

SEQ ID NO: 3527 - protein, 20 aa, synthetic construct
AAYVDPDYYCSDYVLLRYDY

SEQ ID NO: 3528 - protein, 20 aa, synthetic construct
AAYVYPDYYCSEYALSRYDY

SEQ ID NO: 3529 - protein, 20 aa, synthetic construct
AAYIYPDYYCSEYDLLRYDY

SEQ ID NO: 3530 - protein, 20 aa, synthetic construct
AADVYPDYYCSDYVLLRYDY

SEQ ID NO: 3531 - protein, 20 aa, synthetic construct
ASYVYPDYYCSEYVLLKYDY

SEQ ID NO: 3532 - protein, 20 aa, synthetic construct
AAYVYPDDYCSESVLLRYDY

SEQ ID NO: 3533 - protein, 20 aa, synthetic construct
AAYVYPDDYCSDYVLLRYDY

SEQ ID NO: 3534 - protein, 20 aa, synthetic construct
AAYDYPDYYCSDYVLLRYDY

SEQ ID NO: 3535 - protein, 20 aa, synthetic construct
AAYVYPDYYCLEYVLLKYDY

SEQ ID NO: 3536 - protein, 20 aa, synthetic construct
AASVYPDYYCSEYVLLKYDY

SEQ ID NO: 3537 - protein, 20 aa, synthetic construct
ADYVYPDYYCSEYVLLKYDY

SEQ ID NO: 3538 - protein, 20 aa, synthetic construct
AAYVYPDDYCSEYVLSRYDY

SEQ ID NO: 3539 - protein, 20 aa, synthetic construct
AAYVYPDYYCSDYDLLRYDY

SEQ ID NO: 3540 - protein, 20 aa, synthetic construct
AAYVYPDYYCSDYVPLRYDY

SEQ ID NO: 3541 - protein, 20 aa, synthetic construct
AAYVYPDYYCSEYVLSRYDN

SEQ ID NO: 3542 - protein, 20 aa, synthetic construct
AAYVYPDYYCSDYVLIRYDY

SEQ ID NO: 3543 - protein, 20 aa, synthetic construct
ADYVYPDYYCSDYVLLRYDY

SEQ ID NO: 3544 - protein, 20 aa, synthetic construct
AAYVYPDYSCSEYVPLRYDY

SEQ ID NO: 3545 - protein, 20 aa, synthetic construct
AAYVYPDYYCSDYVLLRYVY

SEQ ID NO: 3546 - protein, 20 aa, synthetic construct
AAYVYPDYYCSEYVLLKYGY

SEQ ID NO: 3547 - protein, 20 aa, synthetic construct
AAYVYPDYYCTDYVLLRYDY

SEQ ID NO: 3548 - protein, 20 aa, synthetic construct
AAYVYPDYYCPDYVLLRYDY

SEQ ID NO: 3549 - protein, 20 aa, synthetic construct
AAYVYPDYYCPEYVLLKYDY

SEQ ID NO: 3550 - protein, 20 aa, synthetic construct
AAYVYPDYYCSDYVLLRYAY

SEQ ID NO: 3551 - protein, 20 aa, synthetic construct
AAYAYPDYYCSDYVLLRYDY

SEQ ID NO: 3552 - protein, 20 aa, synthetic construct
AAYVYPDYFCSDYVLLRYDY

SEQ ID NO: 3553 - protein, 20 aa, synthetic construct
AAYVYPDYYCSEYVLLKHDY

SEQ ID NO: 3554 - protein, 20 aa, synthetic construct
AAYVYPDHYCSDYVLLRYDY

SEQ ID NO: 3555 - protein, 20 aa, synthetic construct
AAYVYPDYYCSGYVPSRYDY

SEQ ID NO: 3556 - protein, 20 aa, synthetic construct
AAYVYPDYYCSEYVLSRHDY

SEQ ID NO: 3557 - protein, 20 aa, synthetic construct
AAYVYPDHYCSDYVLLRYDY

SEQ ID NO: 3558 - protein, 20 aa, synthetic construct
AAYVYPEYYCSEYALLRYDY

SEQ ID NO: 3559 - protein, 20 aa, synthetic construct
AAYVYPDYYCSDYVLLRYGY

SEQ ID NO: 3560 - protein, 20 aa, synthetic construct
AAYAYPDYYCSEYVLSRYDY

SEQ ID NO: 3561 - protein, 20 aa, synthetic construct
AAYVYPEYYCSDYVLLRYDY

SEQ ID NO: 3562 - protein, 20 aa, synthetic construct
AAYVYPDYSCSDYVLLRYDY

SEQ ID NO: 3563 - protein, 20 aa, synthetic construct
AAYVDPDYYCSDYVLLRYDY

SEQ ID NO: 3564 - protein, 20 aa, synthetic construct
AAYFYPDYYCSEYVLLKYDY

SEQ ID NO: 3565 - protein, 20 aa, synthetic construct
AAYVYPDYYCSDSVLLRYDY

SEQ ID NO: 3566 - protein, 20 aa, synthetic construct
GAYVYPDYYCSDYVLLRYDY

SEQ ID NO: 3567 - protein, 20 aa, synthetic construct
EAYVYPDYYCSDYVLLRYDY

SEQ ID NO: 3568 - protein, 20 aa, synthetic construct
AAYVYPDNYCSEYVLLRHDY

SEQ ID NO: 3569 - protein, 20 aa, synthetic construct
AAYVYPDYYCSDFVLLRYDY

SEQ ID NO: 3570 - protein, 20 aa, synthetic construct
AAYVYPDYYCSEYVLLKYVY

SEQ ID NO: 3571 - protein, 20 aa, synthetic construct
AAYFYPDYYCSDYVLLRYDY

SEQ ID NO: 3572 - protein, 20 aa, synthetic construct
SAYVYPDYYCSDYVLLRYDY

SEQ ID NO: 3573 - protein, 20 aa, synthetic construct
AAYVYPDYYCSDSVLLRYDY

SEQ ID NO: 3574 - protein, 20 aa, synthetic construct
AAYVYPDYYCTDYVLLRYDY

SEQ ID NO: 3575 - protein, 20 aa, synthetic construct
AAYVYPDYYCSEYVPLRYDN

SEQ ID NO: 3576 - protein, 20 aa, synthetic construct
AAYVYPDYYCPEYVLLKYDY

SEQ ID NO: 3577 - protein, 20 aa, synthetic construct
AAYVYPDYDCSDYVLLRYDY

SEQ ID NO: 3578 - protein, 20 aa, synthetic construct
AAYVSPDYYCSDYVLLRYDY

SEQ ID NO: 3579 - protein, 20 aa, synthetic construct
AAYVYPEYYCSDYVLLRYDY

SEQ ID NO: 3580 - protein, 20 aa, synthetic construct
AASVYPDYYCSEYVPLRYDY

SEQ ID NO: 3581 - protein, 20 aa, synthetic construct
AAYVYPDHYCSEYVLLKYDY

SEQ ID NO: 3582 - protein, 20 aa, synthetic construct
AAFVYPDYYCSEYVLLKYDY

SEQ ID NO: 3583 - protein, 20 aa, synthetic construct
AAYVYPDYYCSEYVLLKYDH

SEQ ID NO: 3584 - protein, 20 aa, synthetic construct
AAYVSPDYYCSEYVLLKYDY

SEQ ID NO: 3585 - protein, 20 aa, synthetic construct
AAYVYPDYSCSEYVLLKYDY

SEQ ID NO: 3586 - protein, 20 aa, synthetic construct
AAYVYPDYSCSEYVLSRYDY

SEQ ID NO: 3587 - protein, 20 aa, synthetic construct
AAYVYSDYYCSDYVLLRYDY

SEQ ID NO: 3588 - protein, 20 aa, synthetic construct
AAYVDPDYYCSEYVLLKYDY

SEQ ID NO: 3589 - protein, 20 aa, synthetic construct
AAYVYPDYYCSEYGLLKYDY

SEQ ID NO: 3590 - protein, 20 aa, synthetic construct
AAYVYPDYYCSEYVLSKYDY

SEQ ID NO: 3591 - protein, 20 aa, synthetic construct
AAYVDPDYYCSEYVLSRYDY

SEQ ID NO: 3592 - protein, 20 aa, synthetic construct
AAYVYPDYYCSDYVLSRYDY

SEQ ID NO: 3593 - protein, 20 aa, synthetic construct
AAYVYPDDYCSDYVLLRYDY

SEQ ID NO: 3594 - protein, 20 aa, synthetic construct
AAYVYPDYYCSEYVKLKYDY

SEQ ID NO: 3595 - protein, 20 aa, synthetic construct
AAYVYPDYYCSDYDLLRYDY

SEQ ID NO: 3596 - protein, 20 aa, synthetic construct
AAYVYPDHYCSEYVLLKYDY

SEQ ID NO: 3597 - protein, 20 aa, synthetic construct
AASVYPDYYCSDYVLLRYDY

SEQ ID NO: 3598 - protein, 20 aa, synthetic construct
ADYVYPDYYCSDYVLLKYDY

SEQ ID NO: 3599 - protein, 20 aa, synthetic construct
AAYVDPDYYCSDYVLLKYDY

SEQ ID NO: 3600 - protein, 20 aa, synthetic construct
AAYDYPDYYCSDYVLLKYDY

SEQ ID NO: 3601 - protein, 20 aa, synthetic construct
AAYVYPDDSCSDYDLLRYDY

SEQ ID NO: 3602 - protein, 20 aa, synthetic construct
AVYVYPDYYCSDYVLLRYDY

SEQ ID NO: 3603 - protein, 20 aa, synthetic construct
AAYVYPDDYCSDSDLLRYDY

SEQ ID NO: 3604 - protein, 20 aa, synthetic construct
AAYVYPDYYCSDYVLLRYDH

SEQ ID NO: 3605 - protein, 20 aa, synthetic construct
AAYVYPDYYCSDYVLLRYDH

SEQ ID NO: 3606 - protein, 20 aa, synthetic construct
AAYVYPDYYCSDYVLLRYDD

SEQ ID NO: 3607 - protein, 20 aa, synthetic construct
AVYVYPDYYCSDYVLLRYDY

SEQ ID NO: 3608 - protein, 20 aa, synthetic construct
AAYVYPDYYCSDYVLFRYDY

SEQ ID NO: 3609 - protein, 20 aa, synthetic construct
ADYVYPDYYCSDYDLLRYDY

SEQ ID NO: 3610 - protein, 20 aa, synthetic construct
AAYVDPDYYCSDYDLLRYDY

SEQ ID NO: 3611 - protein, 20 aa, synthetic construct
AASVYPDYYCSDYDLLRYDY

SEQ ID NO: 3612 - protein, 20 aa, synthetic construct
AAYDYPDYYCSDYDLLRYDY

SEQ ID NO: 3613 - protein, 13 aa, synthetic construct
NIYRSQVPPTRYS

SEQ ID NO: 3614 - protein, 13 aa, synthetic construct
NIYRPQVPTTRYS

SEQ ID NO: 3615 - protein, 13 aa, synthetic construct
NIYRSQVPLTRYS

SEQ ID NO: 3616 - protein, 13 aa, synthetic construct
NIYRSQVPPTRYS

SEQ ID NO: 3617 - protein, 13 aa, synthetic construct
NIYRSQVPFTRYS

SEQ ID NO: 3618 - protein, 13 aa, synthetic construct
NIYRPQVPTTRYS

SEQ ID NO: 3619 - protein, 13 aa, synthetic construct
NIYRSQVSPTRYS

SEQ ID NO: 3620 - protein, 13 aa, synthetic construct
NIYRSQIPSTRYS

SEQ ID NO: 3621 - protein, 13 aa, synthetic construct
NIYRSQVSPTRYS

SEQ ID NO: 3622 - protein, 13 aa, synthetic construct
NIYRSQIPSTRYS

SEQ ID NO: 3623 - protein, 13 aa, synthetic construct
NIYRPQVPTTRYS

SEQ ID NO: 3624 - protein, 13 aa, synthetic construct
NIYRSQVSPTRYS

SEQ ID NO: 3625 - protein, 13 aa, synthetic construct
NIYRSQIPSTRYS

SEQ ID NO: 3626 - protein, 13 aa, synthetic construct
NIYRSQVPSTRYS

SEQ ID NO: 3627 - protein, 13 aa, synthetic construct
NIYRSQVPTTRYS

SEQ ID NO: 3628 - protein, 13 aa, synthetic construct
NIYRSQVPTTRYS

SEQ ID NO: 3629 - protein, 13 aa, synthetic construct
NIYRSQVPLTRYS

SEQ ID NO: 3630 - protein, 13 aa, synthetic construct
NIYRSQVPSTRFA

SEQ ID NO: 3631 - protein, 13 aa, synthetic construct
NIYRSQVPPTRYS

SEQ ID NO: 3632 - protein, 13 aa, synthetic construct
NIYRSQVPLTRYS

SEQ ID NO: 3633 - protein, 13 aa, synthetic construct
NIYRSQIPPTRYS

SEQ ID NO: 3634 - protein, 13 aa, synthetic construct
NIYRSQIPPTRYS

SEQ ID NO: 3635 - protein, 13 aa, synthetic construct
NIYRSQVPSTRYS

SEQ ID NO: 3636 - protein, 13 aa, synthetic construct
NIYRSQVPFTRYS

SEQ ID NO: 3637 - protein, 13 aa, synthetic construct
NIYRPRVPTTRYS

SEQ ID NO: 3638 - protein, 13 aa, synthetic construct
NIFRSQIPTTRYS

SEQ ID NO: 3639 - protein, 13 aa, synthetic construct
NIYRSQVPSTRYS

SEQ ID NO: 3640 - protein, 13 aa, synthetic construct
NIYRPRVPTTRYS

SEQ ID NO: 3641 - protein, 13 aa, synthetic construct
NIYRSQVPFTRYS

SEQ ID NO: 3642 - protein, 13 aa, synthetic construct
NIYRSQGPPTRYS

SEQ ID NO: 3643 - protein, 13 aa, synthetic construct
NIYRPQIPTTRYS

SEQ ID NO: 3644 - protein, 13 aa, synthetic construct
NIYRPRVPTTRYS

SEQ ID NO: 3645 - protein, 13 aa, synthetic construct
NIYRSQVRPTRYS

SEQ ID NO: 3646 - protein, 13 aa, synthetic construct
NIYRSQVQPTRYS

SEQ ID NO: 3647 - protein, 13 aa, synthetic construct
NIYRPQGPTTRYS

SEQ ID NO: 3648 - protein, 13 aa, synthetic construct
NIYRPQGPTTRYS

SEQ ID NO: 3649 - protein, 13 aa, synthetic construct
NIYRPQVPPTRYS

SEQ ID NO: 3650 - protein, 13 aa, synthetic construct
NIYRPQVPPTRYS

SEQ ID NO: 3651 - protein, 13 aa, synthetic construct
NIYRSRVPSTRYS

SEQ ID NO: 3652 - protein, 13 aa, synthetic construct
NIYRSQIPPTRYS

SEQ ID NO: 3653 - protein, 13 aa, synthetic construct
NIYRSQVPTTRYS

SEQ ID NO: 3654 - protein, 13 aa, synthetic construct
NIYRSRVPSTRYS

SEQ ID NO: 3655 - protein, 13 aa, synthetic construct
NIYRSQVPFTRYS

SEQ ID NO: 3656 - protein, 13 aa, synthetic construct
NIYRSQVPFTRYS

SEQ ID NO: 3657 - protein, 13 aa, synthetic construct
NIYRSQVPTTRYS

SEQ ID NO: 3658 - protein, 13 aa, synthetic construct
NIYRSQIPPTRYS

SEQ ID NO: 3659 - protein, 13 aa, synthetic construct
NIYRPQIPTTRYS

SEQ ID NO: 3660 - protein, 13 aa, synthetic construct
NIYRPLVPTTRYS

SEQ ID NO: 3661 - protein, 13 aa, synthetic construct
NIYRSRVPPTRYS

SEQ ID NO: 3662 - protein, 13 aa, synthetic construct
NIYRSRVPPTRYS

SEQ ID NO: 3663 - protein, 13 aa, synthetic construct
NIYRSHVPPTRYS

SEQ ID NO: 3664 - protein, 13 aa, synthetic construct
NIYRSQGPPTRYS

SEQ ID NO: 3665 - protein, 13 aa, synthetic construct
NIYRPQIPTTRYS

SEQ ID NO: 3666 - protein, 13 aa, synthetic construct
NIYRSQVPPTRYS

SEQ ID NO: 3667 - protein, 13 aa, synthetic construct
NIYRPLVPTTRYS

SEQ ID NO: 3668 - protein, 13 aa, synthetic construct
NIYRSQGPPTRYS

SEQ ID NO: 3669 - protein, 13 aa, synthetic construct
NIYRTQVPPTRYS

SEQ ID NO: 3670 - protein, 13 aa, synthetic construct
NIYRTQVPPTRYS

SEQ ID NO: 3671 - protein, 13 aa, synthetic construct
NIYRPQVPPTRYS

SEQ ID NO: 3672 - protein, 13 aa, synthetic construct
NIYRSQVPSTRFA

SEQ ID NO: 3673 - protein, 13 aa, synthetic construct
NIYRSQVPPTRYS

SEQ ID NO: 3674 - protein, 13 aa, synthetic construct
NIYRSQVPSTRFA

SEQ ID NO: 3675 - protein, 13 aa, synthetic construct
NIYRSGVPSTRYS

SEQ ID NO: 3676 - protein, 13 aa, synthetic construct
NIYRSGVPSTRYS

SEQ ID NO: 3677 - protein, 13 aa, synthetic construct
NIYRSEVPPTRYS

SEQ ID NO: 3678 - protein, 13 aa, synthetic construct
NIYRSQAPPTKYS

SEQ ID NO: 3679 - protein, 13 aa, synthetic construct
NIYRPHVPTTRYS

SEQ ID NO: 3680 - protein, 13 aa, synthetic construct
NIYRSQGPTTRYS

SEQ ID NO: 3681 - protein, 13 aa, synthetic construct
NIYRSQAPPTRYS

SEQ ID NO: 3682 - protein, 13 aa, synthetic construct
NIYRPQVPSTRYS

SEQ ID NO: 3683 - protein, 13 aa, synthetic construct
NIYRSRVPSTRYS

SEQ ID NO: 3684 - protein, 13 aa, synthetic construct
NIYRSQVPSTRFA

SEQ ID NO: 3685 - protein, 13 aa, synthetic construct
NIYRPHVPTTRYS

SEQ ID NO: 3686 - protein, 13 aa, synthetic construct
NIYRSEVPPTRYS

SEQ ID NO: 3687 - protein, 13 aa, synthetic construct
NIYRSEVPPTRYS

SEQ ID NO: 3688 - protein, 13 aa, synthetic construct
NIYRSQVPVTRYS

SEQ ID NO: 3689 - protein, 13 aa, synthetic construct
NIYRSQVSSTRYS

SEQ ID NO: 3690 - protein, 13 aa, synthetic construct
NIYRSQVSSTRYS

SEQ ID NO: 3691 - protein, 13 aa, synthetic construct
NIYRSQAPPTRYS

SEQ ID NO: 3692 - protein, 13 aa, synthetic construct
NIYRSQVSSTRYS

SEQ ID NO: 3693 - protein, 13 aa, synthetic construct
NIYRSQIPTTRYS

SEQ ID NO: 3694 - protein, 13 aa, synthetic construct
NIYRPRVPTTRYS

SEQ ID NO: 3695 - protein, 13 aa, synthetic construct
NIYRSKVPSTRYS

SEQ ID NO: 3696 - protein, 13 aa, synthetic construct
NIYRSQISPTRYS

SEQ ID NO: 3697 - protein, 13 aa, synthetic construct
NIYRSQRPSTRYS

SEQ ID NO: 3698 - protein, 13 aa, synthetic construct
NIYRSQISPTRYS

SEQ ID NO: 3699 - protein, 13 aa, synthetic construct
NIYRSHVPTTRYS

SEQ ID NO: 3700 - protein, 13 aa, synthetic construct
NIYRSQVPSTRFA

SEQ ID NO: 3701 - protein, 13 aa, synthetic construct
NIYRSGVPSTRYS

SEQ ID NO: 3702 - protein, 13 aa, synthetic construct
NIYRPQVPLTRYS

SEQ ID NO: 3703 - protein, 13 aa, synthetic construct
NIYRSKVPPTRYS

SEQ ID NO: 3704 - protein, 13 aa, synthetic construct
NIYRPKVPTTRYS

SEQ ID NO: 3705 - protein, 13 aa, synthetic construct
NIYRPQVPSTRYS

SEQ ID NO: 3706 - protein, 13 aa, synthetic construct
NIYRSQVPSTRYS

SEQ ID NO: 3707 - protein, 13 aa, synthetic construct
NIYRPQVPPTRYS

SEQ ID NO: 3708 - protein, 13 aa, synthetic construct
NIFRSQIPTTRYS

SEQ ID NO: 3709 - protein, 13 aa, synthetic construct
NIYRPQVPLTRYS

SEQ ID NO: 3710 - protein, 13 aa, synthetic construct
NIYRSQVPYTRYS

SEQ ID NO: 3711 - protein, 13 aa, synthetic construct
NIYRSQVPVTRYS

SEQ ID NO: 3712 - protein, 13 aa, synthetic construct
NIYRSQASPTRYS

SEQ ID NO: 3713 - protein, 13 aa, synthetic construct
NIYRSRVPTTRYS

SEQ ID NO: 3714 - protein, 13 aa, synthetic construct
NIYRSRVPTTRYS

SEQ ID NO: 3715 - protein, 13 aa, synthetic construct
NIYRSRVPSTRYS

SEQ ID NO: 3716 - protein, 13 aa, synthetic construct
NIYRSEVPSTRYS

SEQ ID NO: 3717 - protein, 27 aa, synthetic construct
AAKRLGPMVHQYSLEVLTPLFLDEYDY

SEQ ID NO: 3718 - protein, 27 aa, synthetic construct
AAKRLGPMVHRYSLEVLTPLFLDEYDY

SEQ ID NO: 3719 - protein, 127 aa, synthetic construct; identical to SEQ ID NO: 2268

SEQ ID NO: 3720 - protein, 127 aa, synthetic construct; identical to SEQ ID NO: 2269

SEQ ID NO: 3721 - protein, 127 aa, synthetic construct; identical to SEQ ID NO: 2270

SEQ ID NO: 3722 - protein, 127 aa, synthetic construct; identical to SEQ ID NO: 2271

SEQ ID NO: 3723 - protein, 127 aa, synthetic construct; identical to SEQ ID NO: 2272

SEQ ID NO: 3724 - protein, 127 aa, synthetic construct; identical to SEQ ID NO: 2251

SEQ ID NO: 3725 - protein, 127 aa, synthetic construct; identical to SEQ ID NO: 2273

SEQ ID NO: 3726 - protein, 127 aa, synthetic construct; identical to SEQ ID NO: 2274

SEQ ID NO: 3727 - protein, 127 aa, synthetic construct; identical to SEQ ID NO: 2275

SEQ ID NO: 3728 - protein, 127 aa, synthetic construct; identical to SEQ ID NO: 2276

SEQ ID NO: 3729 - protein, 127 aa, synthetic construct; identical to SEQ ID NO: 2277

SEQ ID NO: 3730 - protein, 127 aa, synthetic construct; identical to SEQ ID NO: 2278

SEQ ID NO: 3731 - protein, 127 aa, synthetic construct; identical to SEQ ID NO: 2279

SEQ ID NO: 3732 - protein, 127 aa, synthetic construct; identical to SEQ ID NO: 2280

SEQ ID NO: 3733 - protein, 127 aa, synthetic construct; identical to SEQ ID NO: 2281

SEQ ID NO: 3734 - protein, 127 aa, synthetic construct; identical to SEQ ID NO: 2282

SEQ ID NO: 3735 - protein, 127 aa, synthetic construct; identical to SEQ ID NO: 2283

SEQ ID NO: 3736 - protein, 127 aa, synthetic construct; identical to SEQ ID NO: 2284

SEQ ID NO: 3737 - protein, 127 aa, synthetic construct; identical to SEQ ID NO: 2285

SEQ ID NO: 3738 - protein, 127 aa, synthetic construct; identical to SEQ ID NO: 2286

SEQ ID NO: 3739 - protein, 127 aa, synthetic construct; identical to SEQ ID NO: 2287

SEQ ID NO: 3740 - protein, 127 aa, synthetic construct; identical to SEQ ID NO: 2288

SEQ ID NO: 3741 - protein, 127 aa, synthetic construct; identical to SEQ ID NO: 2289

SEQ ID NO: 3742 - protein, 127 aa, synthetic construct; identical to SEQ ID NO: 2290

SEQ ID NO: 3743 - protein, 127 aa, synthetic construct; identical to SEQ ID NO: 2291

SEQ ID NO: 3744 - protein, 127 aa, synthetic construct; identical to SEQ ID NO: 2292

SEQ ID NO: 3745 - protein, 127 aa, synthetic construct; identical to SEQ ID NO: 2293

SEQ ID NO: 3746 - protein, 127 aa, synthetic construct; identical to SEQ ID NO: 2294

SEQ ID NO: 3747 - protein, 127 aa, synthetic construct; identical to SEQ ID NO: 2295

SEQ ID NO: 3748 - protein, 127 aa, synthetic construct; identical to SEQ ID NO: 2296

SEQ ID NO: 3749 - protein, 127 aa, synthetic construct; identical to SEQ ID NO: 2297

SEQ ID NO: 3750 - protein, 127 aa, synthetic construct; identical to SEQ ID NO: 2298

SEQ ID NO: 3751 - protein, 127 aa, synthetic construct; identical to SEQ ID NO: 2299

SEQ ID NO: 3752 - protein, 127 aa, synthetic construct; identical to SEQ ID NO: 2300

SEQ ID NO: 3753 - protein, 127 aa, synthetic construct; identical to SEQ ID NO: 2301

SEQ ID NO: 3754 - protein, 127 aa, synthetic construct; identical to SEQ ID NO: 2302

SEQ ID NO: 3755 - protein, 127 aa, synthetic construct; identical to SEQ ID NO: 2303

SEQ ID NO: 3756 - protein, 127 aa, synthetic construct; identical to SEQ ID NO: 2304

SEQ ID NO: 3757 - protein, 127 aa, synthetic construct; identical to SEQ ID NO: 2305

SEQ ID NO: 3758 - protein, 127 aa, synthetic construct; identical to SEQ ID NO: 2306

SEQ ID NO: 3759 - protein, 127 aa, synthetic construct; identical to SEQ ID NO: 2307

SEQ ID NO: 3760 - protein, 127 aa, synthetic construct; identical to SEQ ID NO: 2308

SEQ ID NO: 3761 - protein, 127 aa, synthetic construct; identical to SEQ ID NO: 2309

SEQ ID NO: 3762 - protein, 127 aa, synthetic construct; identical to SEQ ID NO: 2310

SEQ ID NO: 3763 - protein, 127 aa, synthetic construct; identical to SEQ ID NO: 2311

SEQ ID NO: 3764 - protein, 127 aa, synthetic construct; identical to SEQ ID NO: 2312

SEQ ID NO: 3765 - protein, 127 aa, synthetic construct; identical to SEQ ID NO: 2313

SEQ ID NO: 3766 - protein, 127 aa, synthetic construct; identical to SEQ ID NO: 2314

SEQ ID NO: 3767 - protein, 127 aa, synthetic construct; identical to SEQ ID NO: 2315

SEQ ID NO: 3768 - protein, 127 aa, synthetic construct; identical to SEQ ID NO: 2316

SEQ ID NO: 3769 - protein, 127 aa, synthetic construct; identical to SEQ ID NO: 2317

SEQ ID NO: 3770 - protein, 127 aa, synthetic construct; identical to SEQ ID NO: 2318

SEQ ID NO: 3771 - protein, 127 aa, synthetic construct; identical to SEQ ID NO: 2319

SEQ ID NO: 3772 - protein, 127 aa, synthetic construct; identical to SEQ ID NO: 2320

SEQ ID NO: 3773 - protein, 127 aa, synthetic construct; identical to SEQ ID NO: 2321

SEQ ID NO: 3774 - protein, 127 aa, synthetic construct; identical to SEQ ID NO: 2322

SEQ ID NO: 3775 - protein, 127 aa, synthetic construct; identical to SEQ ID NO: 2323

SEQ ID NO: 3776 - protein, 127 aa, synthetic construct; identical to SEQ ID NO: 2324

SEQ ID NO: 3777 - protein, 127 aa, synthetic construct; identical to SEQ ID NO: 2325

SEQ ID NO: 3778 - protein, 127 aa, synthetic construct; identical to SEQ ID NO: 2326

SEQ ID NO: 3779 - protein, 127 aa, synthetic construct; identical to SEQ ID NO: 2327

SEQ ID NO: 3780 - protein, 131 aa, synthetic construct; identical to SEQ ID NO: 2328

SEQ ID NO: 3781 - protein, 127 aa, synthetic construct; identical to SEQ ID NO: 2329

SEQ ID NO: 3782 - protein, 127 aa, synthetic construct; identical to SEQ ID NO: 2330

SEQ ID NO: 3783 - protein, 127 aa, synthetic construct; identical to SEQ ID NO: 2331

SEQ ID NO: 3784 - protein, 127 aa, synthetic construct; identical to SEQ ID NO: 2332

SEQ ID NO: 3785 - protein, 127 aa, synthetic construct; identical to SEQ ID NO: 2333

SEQ ID NO: 3786 - protein, 127 aa, synthetic construct; identical to SEQ ID NO: 2334

SEQ ID NO: 3787 - protein, 127 aa, synthetic construct; identical to SEQ ID NO: 2335

SEQ ID NO: 3788 - protein, 127 aa, synthetic construct; identical to SEQ ID NO: 2336

SEQ ID NO: 3789 - protein, 127 aa, synthetic construct; identical to SEQ ID NO: 2337

SEQ ID NO: 3790 - protein, 127 aa, synthetic construct; identical to SEQ ID NO: 2338

SEQ ID NO: 3791 - protein, 127 aa, synthetic construct; identical to SEQ ID NO: 2339

SEQ ID NO: 3792 - protein, 127 aa, synthetic construct; identical to SEQ ID NO: 2340

SEQ ID NO: 3793 - protein, 127 aa, synthetic construct; identical to SEQ ID NO: 2341

SEQ ID NO: 3794 - protein, 127 aa, synthetic construct; identical to SEQ ID NO: 2342

SEQ ID NO: 3795 - protein, 127 aa, synthetic construct; identical to SEQ ID NO: 2343

SEQ ID NO: 3796 - protein, 127 aa, synthetic construct; identical to SEQ ID NO: 2344

SEQ ID NO: 3797 - protein, 127 aa, synthetic construct; identical to SEQ ID NO: 2345

SEQ ID NO: 3798 - protein, 127 aa, synthetic construct; identical to SEQ ID NO: 2346

SEQ ID NO: 3799 - protein, 127 aa, synthetic construct; identical to SEQ ID NO: 2347

SEQ ID NO: 3800 - protein, 127 aa, synthetic construct; identical to SEQ ID NO: 2348

SEQ ID NO: 3801 - protein, 127 aa, synthetic construct; identical to SEQ ID NO: 2349

SEQ ID NO: 3802 - protein, 127 aa, synthetic construct; identical to SEQ ID NO: 2350

SEQ ID NO: 3803 - protein, 127 aa, synthetic construct; identical to SEQ ID NO: 2351

SEQ ID NO: 3804 - protein, 127 aa, synthetic construct; identical to SEQ ID NO: 2352

SEQ ID NO: 3805 - protein, 127 aa, synthetic construct; identical to SEQ ID NO: 2353

SEQ ID NO: 3806 - protein, 127 aa, synthetic construct; identical to SEQ ID NO: 2354

SEQ ID NO: 3807 - protein, 127 aa, synthetic construct; identical to SEQ ID NO: 2355

SEQ ID NO: 3808 - protein, 127 aa, synthetic construct; identical to SEQ ID NO: 2356

SEQ ID NO: 3809 - protein, 127 aa, synthetic construct; identical to SEQ ID NO: 2357

SEQ ID NO: 3810 - protein, 131 aa, synthetic construct; identical to SEQ ID NO: 2358

SEQ ID NO: 3811 - protein, 127 aa, synthetic construct; identical to SEQ ID NO: 2359

SEQ ID NO: 3812 - protein, 127 aa, synthetic construct; identical to SEQ ID NO: 2360

SEQ ID NO: 3813 - protein, 127 aa, synthetic construct; identical to SEQ ID NO: 2361

SEQ ID NO: 3814 - protein, 127 aa, synthetic construct; identical to SEQ ID NO: 2362

SEQ ID NO: 3815 - protein, 127 aa, synthetic construct; identical to SEQ ID NO: 2363

SEQ ID NO: 3816 - protein, 127 aa, synthetic construct; identical to SEQ ID NO: 2364

SEQ ID NO: 3817 - protein, 127 aa, synthetic construct; identical to SEQ ID NO: 2365

SEQ ID NO: 3818 - protein, 127 aa, synthetic construct; identical to SEQ ID NO: 2366

SEQ ID NO: 3819 - protein, 127 aa, synthetic construct; identical to SEQ ID NO: 2367

SEQ ID NO: 3820 - protein, 127 aa, synthetic construct; identical to SEQ ID NO: 2368

SEQ ID NO: 3821 - protein, 127 aa, synthetic construct; identical to SEQ ID NO: 2369

SEQ ID NO: 3822 - protein, 127 aa, synthetic construct; identical to SEQ ID NO: 2370

SEQ ID NO: 3823 - protein, 127 aa, synthetic construct; identical to SEQ ID NO: 2371

SEQ ID NO: 3824 - protein, 131 aa, synthetic construct; identical to SEQ ID NO: 2372

SEQ ID NO: 3825 - protein, 127 aa, synthetic construct; identical to SEQ ID NO: 2373

SEQ ID NO: 3826 - protein, 127 aa, synthetic construct; identical to SEQ ID NO: 2374

SEQ ID NO: 3827 - protein, 127 aa, synthetic construct; identical to SEQ ID NO: 2375

SEQ ID NO: 3828 - protein, 127 aa, synthetic construct; identical to SEQ ID NO: 2376

SEQ ID NO: 3829 - protein, 127 aa, synthetic construct; identical to SEQ ID NO: 2377

SEQ ID NO: 3830 - protein, 127 aa, synthetic construct; identical to SEQ ID NO: 2378

SEQ ID NO: 3831 - protein, 127 aa, synthetic construct; identical to SEQ ID NO: 2379

SEQ ID NO: 3832 - protein, 127 aa, synthetic construct; identical to SEQ ID NO: 2380

SEQ ID NO: 3833 - protein, 127 aa, synthetic construct; identical to SEQ ID NO: 2381

SEQ ID NO: 3834 - protein, 131 aa, synthetic construct; identical to SEQ ID NO: 2382

SEQ ID NO: 3835 - protein, 127 aa, synthetic construct; identical to SEQ ID NO: 2383

SEQ ID NO: 3836 - protein, 127 aa, synthetic construct; identical to SEQ ID NO: 2384

SEQ ID NO: 3837 - protein, 127 aa, synthetic construct; identical to SEQ ID NO: 2385

SEQ ID NO: 3838 - protein, 127 aa, synthetic construct; identical to SEQ ID NO: 2386

SEQ ID NO: 3839 - protein, 127 aa, synthetic construct; identical to SEQ ID NO: 2387

SEQ ID NO: 3840 - protein, 127 aa, synthetic construct; identical to SEQ ID NO: 2388

SEQ ID NO: 3841 - protein, 127 aa, synthetic construct; identical to SEQ ID NO: 2389

SEQ ID NO: 3842 - protein, 127 aa, synthetic construct; identical to SEQ ID NO: 2390

SEQ ID NO: 3843 - protein, 127 aa, synthetic construct; identical to SEQ ID NO: 2391

SEQ ID NO: 3844 - protein, 127 aa, synthetic construct; identical to SEQ ID NO: 2392

SEQ ID NO: 3845 - protein, 127 aa, synthetic construct; identical to SEQ ID NO: 2393

SEQ ID NO: 3846 - protein, 127 aa, synthetic construct; identical to SEQ ID NO: 2394

SEQ ID NO: 3847 - protein, 127 aa, synthetic construct; identical to SEQ ID NO: 2395

SEQ ID NO: 3848 - protein, 127 aa, synthetic construct; identical to SEQ ID NO: 2396

SEQ ID NO: 3849 - protein, 127 aa, synthetic construct; identical to SEQ ID NO: 2397

SEQ ID NO: 3850 - protein, 127 aa, synthetic construct; identical to SEQ ID NO: 2398

SEQ ID NO: 3851 - protein, 127 aa, synthetic construct; identical to SEQ ID NO: 2399

SEQ ID NO: 3852 - protein, 127 aa, synthetic construct; identical to SEQ ID NO: 2400

SEQ ID NO: 3853 - protein, 127 aa, synthetic construct; identical to SEQ ID NO: 2401

SEQ ID NO: 3854 - protein, 127 aa, synthetic construct; identical to SEQ ID NO: 2402

SEQ ID NO: 3855 - protein, 127 aa, synthetic construct; identical to SEQ ID NO: 2403

SEQ ID NO: 3856 - protein, 131 aa, synthetic construct; identical to SEQ ID NO: 2404

SEQ ID NO: 3857 - protein, 127 aa, synthetic construct; identical to SEQ ID NO: 2405

SEQ ID NO: 3858 - protein, 127 aa, synthetic construct; identical to SEQ ID NO: 2406

SEQ ID NO: 3859 - protein, 127 aa, synthetic construct; identical to SEQ ID NO: 2407

SEQ ID NO: 3860 - protein, 127 aa, synthetic construct; identical to SEQ ID NO: 2408

SEQ ID NO: 3861 - protein, 127 aa, synthetic construct; identical to SEQ ID NO: 2409

SEQ ID NO: 3862 - protein, 127 aa, synthetic construct; identical to SEQ ID NO: 2410

SEQ ID NO: 3863 - protein, 127 aa, synthetic construct; identical to SEQ ID NO: 2411

SEQ ID NO: 3864 - protein, 127 aa, synthetic construct; identical to SEQ ID NO: 2412

SEQ ID NO: 3865 - protein, 127 aa, synthetic construct; identical to SEQ ID NO: 2413

SEQ ID NO: 3866 - protein, 127 aa, synthetic construct; identical to SEQ ID NO: 2414

SEQ ID NO: 3867 - protein, 127 aa, synthetic construct; identical to SEQ ID NO: 2415

SEQ ID NO: 3868 - protein, 127 aa, synthetic construct; identical to SEQ ID NO: 2416

SEQ ID NO: 3869 - protein, 127 aa, synthetic construct; identical to SEQ ID NO: 2417

SEQ ID NO: 3870 - protein, 127 aa, synthetic construct; identical to SEQ ID NO: 2418

SEQ ID NO: 3871 - protein, 127 aa, synthetic construct; identical to SEQ ID NO: 2419

SEQ ID NO: 3872 - protein, 127 aa, synthetic construct; identical to SEQ ID NO: 2420

SEQ ID NO: 3873 - protein, 127 aa, synthetic construct; identical to SEQ ID NO: 2421

SEQ ID NO: 3874 - protein, 127 aa, synthetic construct; identical to SEQ ID NO: 2422

SEQ ID NO: 3875 - protein, 127 aa, synthetic construct; identical to SEQ ID NO: 2423

SEQ ID NO: 3876 - protein, 127 aa, synthetic construct; identical to SEQ ID NO: 2424

SEQ ID NO: 3877 - protein, 127 aa, synthetic construct; identical to SEQ ID NO: 2425

SEQ ID NO: 3878 - protein, 127 aa, synthetic construct; identical to SEQ ID NO: 2426

SEQ ID NO: 3879 - protein, 127 aa, synthetic construct; identical to SEQ ID NO: 2427

SEQ ID NO: 3880 - protein, 127 aa, synthetic construct; identical to SEQ ID NO: 2428

SEQ ID NO: 3881 - protein, 127 aa, synthetic construct; identical to SEQ ID NO: 2429

SEQ ID NO: 3882 - protein, 131 aa, synthetic construct; identical to SEQ ID NO: 2430

SEQ ID NO: 3883 - protein, 127 aa, synthetic construct; identical to SEQ ID NO: 2431

SEQ ID NO: 3884 - protein, 127 aa, synthetic construct; identical to SEQ ID NO: 2432

SEQ ID NO: 3885 - protein, 127 aa, synthetic construct; identical to SEQ ID NO: 2433

SEQ ID NO: 3886 - protein, 127 aa, synthetic construct; identical to SEQ ID NO: 2434

SEQ ID NO: 3887 - protein, 131 aa, synthetic construct; identical to SEQ ID NO: 2435

SEQ ID NO: 3888 - protein, 127 aa, synthetic construct; identical to SEQ ID NO: 2436

SEQ ID NO: 3889 - protein, 127 aa, synthetic construct; identical to SEQ ID NO: 2437

SEQ ID NO: 3890 - protein, 127 aa, synthetic construct; identical to SEQ ID NO: 2438

SEQ ID NO: 3891 - protein, 127 aa, synthetic construct; identical to SEQ ID NO: 2439

SEQ ID NO: 3892 - protein, 127 aa, synthetic construct; identical to SEQ ID NO: 2440

SEQ ID NO: 3893 - protein, 127 aa, synthetic construct; identical to SEQ ID NO: 2441

SEQ ID NO: 3894 - protein, 127 aa, synthetic construct; identical to SEQ ID NO: 2442

SEQ ID NO: 3895 - protein, 127 aa, synthetic construct; identical to SEQ ID NO: 2443

SEQ ID NO: 3896 - protein, 127 aa, synthetic construct; identical to SEQ ID NO: 2444

SEQ ID NO: 3897 - protein, 127 aa, synthetic construct; identical to SEQ ID NO: 2445

SEQ ID NO: 3898 - protein, 127 aa, synthetic construct; identical to SEQ ID NO: 2446

SEQ ID NO: 3899 - protein, 127 aa, synthetic construct; identical to SEQ ID NO: 2447

SEQ ID NO: 3900 - protein, 127 aa, synthetic construct; identical to SEQ ID NO: 2448

SEQ ID NO: 3901 - protein, 127 aa, synthetic construct; identical to SEQ ID NO: 2449

SEQ ID NO: 3902 - protein, 127 aa, synthetic construct; identical to SEQ ID NO: 2450

SEQ ID NO: 3903 - protein, 127 aa, synthetic construct; identical to SEQ ID NO: 2451

SEQ ID NO: 3904 - protein, 127 aa, synthetic construct; identical to SEQ ID NO: 2452

SEQ ID NO: 3905 - protein, 127 aa, synthetic construct; identical to SEQ ID NO: 2453

SEQ ID NO: 3906 - protein, 127 aa, synthetic construct; identical to SEQ ID NO: 2454

SEQ ID NO: 3907 - protein, 127 aa, synthetic construct; identical to SEQ ID NO: 2455

SEQ ID NO: 3908 - protein, 127 aa, synthetic construct; identical to SEQ ID NO: 2456

SEQ ID NO: 3909 - protein, 117 aa, synthetic construct; identical to SEQ ID NO: 2252

SEQ ID NO: 3910 - protein, 117 aa, synthetic construct; identical to SEQ ID NO: 2457

SEQ ID NO: 3911 - protein, 119 aa, synthetic construct; identical to SEQ ID NO: 2458

SEQ ID NO: 3912 - protein, 117 aa, synthetic construct; identical to SEQ ID NO: 2459

SEQ ID NO: 3913 - protein, 117 aa, synthetic construct; identical to SEQ ID NO: 2460

SEQ ID NO: 3914 - protein, 117 aa, synthetic construct; identical to SEQ ID NO: 2461

SEQ ID NO: 3915 - protein, 117 aa, synthetic construct; identical to SEQ ID NO: 2462

SEQ ID NO: 3916 - protein, 118 aa, synthetic construct; identical to SEQ ID NO: 2463

SEQ ID NO: 3917 - protein, 117 aa, synthetic construct; identical to SEQ ID NO: 2464

SEQ ID NO: 3918 - protein, 119 aa, synthetic construct; identical to SEQ ID NO: 2465

SEQ ID NO: 3919 - protein, 117 aa, synthetic construct; identical to SEQ ID NO: 2466

SEQ ID NO: 3920 - protein, 117 aa, synthetic construct; identical to SEQ ID NO: 2467

SEQ ID NO: 3921 - protein, 119 aa, synthetic construct; identical to SEQ ID NO: 2468

SEQ ID NO: 3922 - protein, 119 aa, synthetic construct; identical to SEQ ID NO: 2469

SEQ ID NO: 3923 - protein, 119 aa, synthetic construct; identical to SEQ ID NO: 2470

SEQ ID NO: 3924 - protein, 119 aa, synthetic construct; identical to SEQ ID NO: 2471

SEQ ID NO: 3925 - protein, 117 aa, synthetic construct; identical to SEQ ID NO: 2472

SEQ ID NO: 3926 - protein, 119 aa, synthetic construct; identical to SEQ ID NO: 2473

SEQ ID NO: 3927 - protein, 117 aa, synthetic construct; identical to SEQ ID NO: 2474

SEQ ID NO: 3928 - protein, 119 aa, synthetic construct; identical to SEQ ID NO: 2475

SEQ ID NO: 3929 - protein, 119 aa, synthetic construct; identical to SEQ ID NO: 2476

SEQ ID NO: 3930 - protein, 117 aa, synthetic construct; identical to SEQ ID NO: 2477

SEQ ID NO: 3931 - protein, 119 aa, synthetic construct; identical to SEQ ID NO: 2478

SEQ ID NO: 3932 - protein, 117 aa, synthetic construct; identical to SEQ ID NO: 2479

SEQ ID NO: 3933 - protein, 117 aa, synthetic construct; identical to SEQ ID NO: 2480

SEQ ID NO: 3934 - protein, 119 aa, synthetic construct; identical to SEQ ID NO: 2481

SEQ ID NO: 3935 - protein, 117 aa, synthetic construct; identical to SEQ ID NO: 2482

SEQ ID NO: 3936 - protein, 117 aa, synthetic construct; identical to SEQ ID NO: 2483

SEQ ID NO: 3937 - protein, 116 aa, synthetic construct; identical to SEQ ID NO: 2484

SEQ ID NO: 3938 - protein, 117 aa, synthetic construct; identical to SEQ ID NO: 2485

SEQ ID NO: 3939 - protein, 117 aa, synthetic construct; identical to SEQ ID NO: 2486

SEQ ID NO: 3940 - protein, 117 aa, synthetic construct; identical to SEQ ID NO: 2487

SEQ ID NO: 3941 - protein, 117 aa, synthetic construct; identical to SEQ ID NO: 2488

SEQ ID NO: 3942 - protein, 117 aa, synthetic construct; identical to SEQ ID NO: 2489

SEQ ID NO: 3943 - protein, 117 aa, synthetic construct; identical to SEQ ID NO: 2490

SEQ ID NO: 3944 - protein, 117 aa, synthetic construct; identical to SEQ ID NO: 2491

SEQ ID NO: 3945 - protein, 117 aa, synthetic construct; identical to SEQ ID NO: 2492

SEQ ID NO: 3946 - protein, 117 aa, synthetic construct; identical to SEQ ID NO: 2493

SEQ ID NO: 3947 - protein, 119 aa, synthetic construct; identical to SEQ ID NO: 2494

SEQ ID NO: 3948 - protein, 119 aa, synthetic construct; identical to SEQ ID NO: 2495

SEQ ID NO: 3949 - protein, 119 aa, synthetic construct; identical to SEQ ID NO: 2496

SEQ ID NO: 3950 - protein, 119 aa, synthetic construct; identical to SEQ ID NO: 2497

SEQ ID NO: 3951 - protein, 116 aa, synthetic construct; identical to SEQ ID NO: 2498

SEQ ID NO: 3952 - protein, 117 aa, synthetic construct; identical to SEQ ID NO: 2499

SEQ ID NO: 3953 - protein, 119 aa, synthetic construct; identical to SEQ ID NO: 2500

SEQ ID NO: 3954 - protein, 117 aa, synthetic construct; identical to SEQ ID NO: 2501

SEQ ID NO: 3955 - protein, 117 aa, synthetic construct; identical to SEQ ID NO: 2502

SEQ ID NO: 3956 - protein, 117 aa, synthetic construct; identical to SEQ ID NO: 2503

SEQ ID NO: 3957 - protein, 117 aa, synthetic construct; identical to SEQ ID NO: 2504

SEQ ID NO: 3958 - protein, 119 aa, synthetic construct; identical to SEQ ID NO: 2505

SEQ ID NO: 3959 - protein, 119 aa, synthetic construct; identical to SEQ ID NO: 2506

SEQ ID NO: 3960 - protein, 117 aa, synthetic construct; identical to SEQ ID NO: 2507

SEQ ID NO: 3961 - protein, 117 aa, synthetic construct; identical to SEQ ID NO: 2508

SEQ ID NO: 3962 - protein, 117 aa, synthetic construct; identical to SEQ ID NO: 2509

SEQ ID NO: 3963 - protein, 117 aa, synthetic construct; identical to SEQ ID NO: 2510

SEQ ID NO: 3964 - protein, 117 aa, synthetic construct; identical to SEQ ID NO: 2511

SEQ ID NO: 3965 - protein, 117 aa, synthetic construct; identical to SEQ ID NO: 2512

SEQ ID NO: 3966 - protein, 117 aa, synthetic construct; identical to SEQ ID NO: 2513

SEQ ID NO: 3967 - protein, 117 aa, synthetic construct; identical to SEQ ID NO: 2514

SEQ ID NO: 3968 - protein, 119 aa, synthetic construct; identical to SEQ ID NO: 2515

SEQ ID NO: 3969 - protein, 119 aa, synthetic construct; identical to SEQ ID NO: 2516

SEQ ID NO: 3970 - protein, 119 aa, synthetic construct; identical to SEQ ID NO: 2517

SEQ ID NO: 3971 - protein, 119 aa, synthetic construct; identical to SEQ ID NO: 2518

SEQ ID NO: 3972 - protein, 119 aa, synthetic construct; identical to SEQ ID NO: 2519

SEQ ID NO: 3973 - protein, 117 aa, synthetic construct; identical to SEQ ID NO: 2520

SEQ ID NO: 3974 - protein, 117 aa, synthetic construct; identical to SEQ ID NO: 2521

SEQ ID NO: 3975 - protein, 117 aa, synthetic construct; identical to SEQ ID NO: 2522

SEQ ID NO: 3976 - protein, 119 aa, synthetic construct; identical to SEQ ID NO: 2523

SEQ ID NO: 3977 - protein, 119 aa, synthetic construct; identical to SEQ ID NO: 2524

SEQ ID NO: 3978 - protein, 119 aa, synthetic construct; identical to SEQ ID NO: 2525

SEQ ID NO: 3979 - protein, 119 aa, synthetic construct; identical to SEQ ID NO: 2526

SEQ ID NO: 3980 - protein, 119 aa, synthetic construct; identical to SEQ ID NO: 2527

SEQ ID NO: 3981 - protein, 117 aa, synthetic construct; identical to SEQ ID NO: 2528

SEQ ID NO: 3982 - protein, 117 aa, synthetic construct; identical to SEQ ID NO: 2529

SEQ ID NO: 3983 - protein, 117 aa, synthetic construct; identical to SEQ ID NO: 2530

SEQ ID NO: 3984 - protein, 119 aa, synthetic construct; identical to SEQ ID NO: 2531

SEQ ID NO: 3985 - protein, 119 aa, synthetic construct; identical to SEQ ID NO: 2532

SEQ ID NO: 3986 - protein, 119 aa, synthetic construct; identical to SEQ ID NO: 2533

SEQ ID NO: 3987 - protein, 117 aa, synthetic construct; identical to SEQ ID NO: 2534

SEQ ID NO: 3988 - protein, 119 aa, synthetic construct; identical to SEQ ID NO: 2535

SEQ ID NO: 3989 - protein, 119 aa, synthetic construct; identical to SEQ ID NO: 2536

SEQ ID NO: 3990 - protein, 117 aa, synthetic construct; identical to SEQ ID NO: 2537

SEQ ID NO: 3991 - protein, 119 aa, synthetic construct; identical to SEQ ID NO: 2538

SEQ ID NO: 3992 - protein, 117 aa, synthetic construct; identical to SEQ ID NO: 2539

SEQ ID NO: 3993 - protein, 119 aa, synthetic construct; identical to SEQ ID NO: 2540

SEQ ID NO: 3994 - protein, 117 aa, synthetic construct; identical to SEQ ID NO: 2541

SEQ ID NO: 3995 - protein, 119 aa, synthetic construct; identical to SEQ ID NO: 2542

SEQ ID NO: 3996 - protein, 119 aa, synthetic construct; identical to SEQ ID NO: 2543

SEQ ID NO: 3997 - protein, 119 aa, synthetic construct; identical to SEQ ID NO: 2544

SEQ ID NO: 3998 - protein, 117 aa, synthetic construct; identical to SEQ ID NO: 2545

SEQ ID NO: 3999 - protein, 119 aa, synthetic construct; identical to SEQ ID NO: 2546

SEQ ID NO: 4000 - protein, 117 aa, synthetic construct; identical to SEQ ID NO: 2547

SEQ ID NO: 4001 - protein, 117 aa, synthetic construct; identical to SEQ ID NO: 2548

SEQ ID NO: 4002 - protein, 119 aa, synthetic construct; identical to SEQ ID NO: 2549

SEQ ID NO: 4003 - protein, 117 aa, synthetic construct; identical to SEQ ID NO: 2550

SEQ ID NO: 4004 - protein, 119 aa, synthetic construct; identical to SEQ ID NO: 2551

SEQ ID NO: 4005 - protein, 119 aa, synthetic construct; identical to SEQ ID NO: 2552

SEQ ID NO: 4006 - protein, 119 aa, synthetic construct; identical to SEQ ID NO: 2553

SEQ ID NO: 4007 - protein, 119 aa, synthetic construct; identical to SEQ ID NO: 2554

SEQ ID NO: 4008 - protein, 117 aa, synthetic construct; identical to SEQ ID NO: 2555

SEQ ID NO: 4009 - protein, 119 aa, synthetic construct; identical to SEQ ID NO: 2556

SEQ ID NO: 4010 - protein, 119 aa, synthetic construct; identical to SEQ ID NO: 2557

SEQ ID NO: 4011 - protein, 119 aa, synthetic construct; identical to SEQ ID NO: 2558

SEQ ID NO: 4012 - protein, 117 aa, synthetic construct; identical to SEQ ID NO: 2559

SEQ ID NO: 4013 - protein, 134 aa, synthetic construct; identical to SEQ ID NO: 2253

SEQ ID NO: 4014 - protein, 134 aa, synthetic construct; identical to SEQ ID NO: 2254

SEQ ID NO: 4015 - DNA, 381 bp, synthetic construct
  source 1..381: mol_type = other DNA
gaggtgcagctggtggagtctgggggagacttggtgcagcctggggggtctctgagactctcctgtgcagcctctggattcactttggattattacgccataggctggttccgccaggccccagggaaggagcgtgagggggtctcatgtattagcagagatggtgatagcacaaattatggagactccgtgaagggccgattcaccatctccagagacaatgccaagaacacggtgtatctgcaaatgaacagcctggaacctgaggacacagccgtttattactgtgcagcctacgtttaccctgattactactgttcagagtatgtcctgttaaaatatgactactggggccaggggacccaggtcaccgtctcctca

SEQ ID NO: 4016 - DNA, 381 bp, synthetic construct
  source 1..381: mol_type = other DNA
gaggtgcagctggtggagtctgggggaggcttggtgcagcctggggggtctctgagactctcctgtgcagcctctgaattcactttggattattatgccataggctggttccgccaggccccagggaaggagcgtgagggggtctcatgtattagtactagtggtgatagcacaaactatgcagactccgtgaagggccgattcaccatctccagagacagcgccaagaacacggtgtatctgcaaatgaacagcctgaaacctgaggacacagccgtttattactgtgcagcctacgtttaccctgattactactgttcagaatatgtcctgttaaggtatgactactggggccaggggacccaggtcaccgtctcctca

SEQ ID NO: 4017 - DNA, 381 bp, synthetic construct
  source 1..381: mol_type = other DNA
gaggtgcagctggtggagtctgggggaggcttggtgcaccctgggggctctctgagactctcctgtgcagcctctgaattcactttggattattatgccataggctggttccgccaggccccagggaaggaccgtgagggggtctcatgtattagtagagatggtgatagtacaaactatgcagactccgtgaagggccgattcaccatctccagagacaacgccaagaacacggtgtatctgcaaatgaacagcctgaaacctgaggacacagccgtttattactgtgcagcctacgtttaccctgattactactgttcagagtatgtcctgttaaaatatgactactggggccaggggacccaggtcaccgtctcctca

SEQ ID NO: 4018 - DNA, 381 bp, synthetic construct
  source 1..381: mol_type = other DNA
gaggtgcagctggtggagtctgggggaggcttggtgcagcctggggggtctctgagactctcctgtgcagcctctggattcactttggattattacgccataggctggttccgccaggccccagggaaggagcgtgagggggtctcatgtattagtagagatggtgatagcacaaattatggagactccgtgaagggccgattcaccatctccagagacaatgccaagaacacggtgtatctgcaaatgaacagcctggaacctgaggacacagccgtttattactgtgcagcctacgtttaccctgattactactgttcagagtatgtcccgttaaaatatgactactggggccaggggacccaggtcaccgtctcctca

SEQ ID NO: 4019 - DNA, 381 bp, synthetic construct
  source 1..381: mol_type = other DNA
gaggtgcagctggtggagtctgggggaggcttggtgcagcctggggggtctctgagactctcctgtgcagcctctggattcactttggagtattatgccatcggctggttccgccaggccccagggaaggagcgtgagggtgtctcatgtattagtagtagtggtgatagcacaaactatgcagattccgtgaagggccgattcaccatctccagagacaacgccaagaacacggtgtatctgcaaatgaacagcctgaaacctgaggacacagccgtttattactgtgcagcctacgtttaccctgattactactgttcagaatatgtcctgttaaagtatgactactggggccaggggacccaggtcaccgtctcctca

SEQ ID NO: 4020 - DNA, 381 bp, synthetic construct; identical to SEQ ID NO: 2255
  source 1..381: mol_type = other DNA

SEQ ID NO: 4021 - DNA, 381 bp, synthetic construct
  source 1..381: mol_type = other DNA
gaggtgcagctggtggagtctgggggaggcttggtgcagcctggggggtctctgagactctcctgtgcagcctctggattcactttggattattatggcataggctggttccgccaggccccagggaaggagcgtgagggggtctcatgtattagtagtagtggtgatagcacaaactatgcagactccgtgaagggccgattcaccatctccagagacaacgccaagaacacggtgtatctgcaaatgaacagcctgaaacctgaagacacaggcgtttattactgtgcagcctacgtttaccctgattactactgttcagagtatgtgctgttaaggtatgactactggggccaggggacccaggtcaccgtctcctca

SEQ ID NO: 4022 - DNA, 381 bp, synthetic construct
  source 1..381: mol_type = other DNA
gaggtgcagctggtggagtctgggggaggcttggtgcagcctggggggtctctgagactctcctgtgcagcctctggattcactttggattattatgccataggctggttccgccaggtcccagggaaggagcgtgagggggtctcatgtattagtagtagtggtgatagcacaaattatggaacctccgtgaagggccgattcaccatctccagagacaacgccaagaacacggtgtcgctgcaaatgaacagcctgaaacctgaggacacagccgtttattactgtgcagcctacgtttaccctgattactactgttcagagtatatcctgtccaagtatgactattggggccaggggacccaggtcaccgtctcctca

SEQ ID NO: 4023 - DNA, 381 bp, synthetic construct
  source 1..381: mol_type = other DNA
gaggtgcagctggtggagtctgggggaggcttggtgcagcctggggggtctctgagactctcctgtgcagcctctgaattcactttggattattatgccataggctggttccgccaggccccagggaaggagcgtgagggggtctcatgtattagtagggatgctgataacacaaactatgcagactccgtgaagggccgattcaccatctccagagacaacgccaagaacacggtgtatctgcaaatgaacagcctgaaacctgaggacacagccgtttattactgtgcagcctacgtttaccctgattactactgttcagactatgtcctgttaaaatatgactactggggccaggggacccaggtcaccgtctcctca

SEQ ID NO: 4024 - DNA, 381 bp, synthetic construct
  source 1..381: mol_type = other DNA
gaggtgcagctggtggagtctgggggaggcttggtgcagcctggggggtctctgagactctcctgtgcagcctctgaatcgactttggattattatgccataggctggttccgccaggccccagggaaggagcgtgagggtgtctcatgtattagtgttagtggtgatagcacaaactatgcaaactccgtgaagggccgattcaccatctccagagacaacgccaagaacacggtgtatctgcaaatgaacagcctgaaacctgaggacacagccgtttattactgtgcagcctacgtttaccctgattactactgttcagagtatgtcctattaaagtatgactactggggccaggggacccaggtcaccgtctcctca

SEQ ID NO: 4025 - DNA, 381 bp, synthetic construct
  source 1..381: mol_type = other DNA
gaggtgcagctggtggagtctgggggaggcttggtgcagcctggggggtctctgagactctcctgtgcagcctctggattcactttggattattacgccataggctggttccgccaggccccagggaaggagcgtgagggggtctcatgtattagtagagatggtgatagcacaaattatggagactccgtgaagggccgattcaccacctccagagacaatgctaagaacacggtgtatctgcaaatgaacagcctggaacctgaggacacagccgtttattactgtgcagcctacgtttaccctgattactactgttcagagtatgtcctgttaaaatatgactactggggccaggggacccaggtcaccgtctcctca

SEQ ID NO: 4026 - DNA, 381 bp, synthetic construct
  source 1..381: mol_type = other DNA
gaggtgcagctggtggagtctgggggaggcttggtgcagcctggggggtctctgagactctcctgtgcagcctctgaattcactttggattattatgccgtaggctggttccgccaggccccagggaaggagcgtgagggtgtctcatgtattagtagtagtggtgatgctacagactatgcagactccgtgaagggccgattcaccatctccagagacaacgccaagaacacggtgtatctgcaaatgaacagcctgaaatttgaggacacagccgtttattactgtgcagcctacgtttaccctgattactactgttcagagtatgtcctgttaaagtatgactactggggccaggggacccaggtcaccgtctcctca

SEQ ID NO: 4027 - DNA, 381 bp, synthetic construct
  source 1..381: mol_type = other DNA
gaggtgcagctggtggagtctgggggaggcttggtgcagcctggggggtctctgagactctcctgtgcagcccctggattcactttggattattatgccataggctggttccgccaggccccagggaaggagcgtgagggtgtctcatgtattagtagtagtggtgatagcacaaactatgcagactccgtgaagggccgattcaccatctccagagacaacgccaagaacacggtgtatctgcaaatgaacagcctgaaacctgaggacacagccgtttattactgtgcagcctacgtttaccctgattactactgttcagaatatgtcctgttaaagtatgactactggggccaggggacccaggtcaccgtctcctca

SEQ ID NO: 4028 - DNA, 381 bp, synthetic construct
  source 1..381: mol_type = other DNA
gaggtgcagctggtggagtctgggggaggcttggtgcagcctggggggtctctgagactctcctgtgcagcctctggattcactttggattattacgccataggctggttccgccaggccccagggaaggagcgtgagggggtctcatgtattagtagagatggtgatagcacaaattatggagactccgtgaagggccgattcaccatctccagagacaatgccaagaacacggtgtatctgcaaatgaacaatctggaacctgaggacacagccgtttattactgtgcagcctacgtttaccctgattactactgttcagagtatgtcctgttaaaatatgactactggggccaggggacccaggtcaccgtctcctca

SEQ ID NO: 4029 - DNA, 381 bp, synthetic construct
  source 1..381: mol_type = other DNA
gaggtgcagctggtggagtctgggggaggcttggtgcagcctggggggtctctgagactctcctgtgcagcctctggattcactttggattattacgccataggctggttccgccaggccccagggaaggagcgtgagggggtctcatgtattagtagagatggtgatagcacaaattatggagactccgtgaagggccgattcaccatctccagagacaatgccaagaacacggtgtatctgcaaatgaacagcctggaacctgaggacacagccgtttattactgtgcagcctacgtttaccctgattactactgttcagagtatgtcctgttaaaatatgactactggagccaggggacccaggtcaccgtctcctca

SEQ ID NO: 4030 - DNA, 381 bp, synthetic construct
  source 1..381: mol_type = other DNA
gaggtgcagctggtggagtctgggggaggcttggtgcagcctggggggtctctgagactctcctgtgcagcctctggattcactttggattattattccataggctggttccgccaggccccagggaaggagcgtgagggggtctcatgtattagtagtagtggtgatagcacaaactatcgggactccgtgaagggccgattcaccatctccagagacaacgccaagaacacggtgtatctgcaaatgaacagcctgaaacctgaggacacagccgtttattactgtgcagcctacgtttaccctgattactactgttcagaatatgtcaagttaaagtatgactattggggccaggggacccaggtcaccgtctcctca

SEQ ID NO: 4031 - DNA, 381 bp, synthetic construct
  source 1..381: mol_type = other DNA
gaggtgcagctggtggagtctgggggaggcttggtgcagcctggggggtctctgagactctcctgtgcagcctctgaattcactttggattattatgccataggctggttccgccagaccccagggaaggagcgtgagggggtctcatgtattagtacaagtggtgatagcacaaactatgcagagtccgtgaagggccgattcaccatctccagagacaacgccaagaacacggtgtatctgcaaatgaacagcctgaaacctgaggacacagccgtttattactgtgcagcctacgtttaccctgattactactgttcagactatgtcctgttaaagtatgactactggggccaggggacccaggtcaccgtctcctca

SEQ ID NO: 4032 - DNA, 381 bp, synthetic construct
  source 1..381: mol_type = other DNA
gaggtgcagctggtggagtctgggggaggcttggtgcagcctggggggtctctgagactctcctgtacaggctctgacgtcactttggattattatgccataggctggttccgccaggccccagggaaggagcgtgagggtgtctcatgtattagtagtagtggtgatagcacaaactatgcagactccgtgaagggccgattcaccatctccagagacagcgccaagaacacggtgtatctgcaaatgaacagcctgaaacctgaggacacagccgtttattactgtgcagcctacgtttaccctgattactactgttcagaatatgtcctgttaaagtatgactactggggccaggggacccaggtcaccgtctcctca

SEQ ID NO: 4033 - DNA, 381 bp, synthetic construct
  source 1..381: mol_type = other DNA
gaggtgcagctggtggagtctgggggaggcttggtgcagcctggggggtctctgagactctcctgtgcagcctctggattcactttggattattatgccataggctggttccgccaggccccagggaaggagcgtgagggtgtctcatgtattagtagtagtggtgatagcacaaactatgcagactccgtgaagggccgattcaccatctccagagacaacgccaagaacacggtgactctgcaaatgaacagcctgaaacctgaggacacagccgtttattactgtgcagcctacgtttaccctgattactactgttcagaatatgtcctgttaaaatatgactactggggccaggggacccaggtcaccgtctcctca

SEQ ID NO: 4034 - DNA, 381 bp, synthetic construct
  source 1..381: mol_type = other DNA
gaggtgcagctggtggagtctgggggaggcttggtgcagcctggggggtctctgagactctcctgtgcagcctctggattcactttggattattatagcataggctggttccgccaggccccagggaaggagcgtgagggggtctcatgtattagtagtagtggtgatagcacaaactatgcagactccgtgaagggccgattcaccatctccagagacagcgccaagaacacggtgtatctgcaaatgaacagcctgaaacctgaggacacagccgtttattactgtgcagcctacgtttaccctgattactactgttcagaatatgtcctgttaaaatatgactactggggccaggggacccaggtcaccgtctcctca

SEQ ID NO: 4035 - DNA, 381 bp, synthetic construct
  source 1..381: mol_type = other DNA
gaggtgcagctggtggagtctgggggaggcttggtgcagcctggggggtctctgagactctcctgtgcagcctctggattccctttgggttattattccataggctggttccgccaggccccagggaaggagcgtgagggggtctcatgtattagtagtagtggtgatagcacaaactatgcagactccgtgaagggccgattcaccatctccagagacaacgccaagaacacggtgtatctgcaaatgaacagcctgaaacctgaggacacagccgtttattactgtgcagcctacgtttaccctgattactactgttcagagtatgtcctgttaaagtatgactattggggccaggggacccaggtcaccgtctcctca

SEQ ID NO: 4036 - DNA, 381 bp, synthetic construct
  source 1..381: mol_type = other DNA
gaggtgcagctggtggagtctgggggaggcttggtgcagcctggggggtctctgagactctcctgtgcagcctctggattcactttaggttattattccataggctggttccgccaggccccagggaaggagcgtgagggggtctcatgtattagtagtagtggtgatagcacaaactatgcagactccgtgaagggccgattcaccatctccagagacaacgccaagaacacggtgtatctgcaaatgaacagcctgaaacctgaggacacagccgtttattactgtgcagcctacgtttaccctgattactactgttcagaatatgtcaagttaaagtatgactactggggccaggggacccaggtcaccgtctcctca

SEQ ID NO: 4037 - DNA, 381 bp, synthetic construct
  source 1..381: mol_type = other DNA
gaggtgcagctggtggagtctgggggaggcttggtgcagcctggggggtctctgagactctcctgtgcagcctctggattcactttggattattacgccataggctggttccgccaggccccagggaaggagcgtgagggggtctcatgtattagtagagatggtgatagcacaaattatggagactccgtgaagggccgattcaccatctccagagacaatgccaagaacacggtgtatctgcaaatgaacagcctggaatctgaggacacagccgtttattactgtgcagcctacgtttaccctgattactactgttcagagtatgtcctgttaaaatatgactactggggccaggggacccaggtcaccgtctcctca

SEQ ID NO: 4038 - DNA, 381 bp, synthetic construct
  source 1..381: mol_type = other DNA
gaggtgcagctggtggagtctgggggaggcttggtgcagcctggggggtctctgagactctcctgtgcagcctctggattcactttggattattatgccataggctggttccgccaggccccagggaaggagcgtgagggggtctcatgtattagtagtagtggtgatagcacaaactatgcagactccgtgaagggccgattcaccatctccagagacaacgccaagaacacggtgtatctgcaaatgaacagcctgaaacctgaggacacagccgtttattactgcgcagcctacgtttaccctgattactactgttcagagtatgtcctgttaaaatatgactactggggccaggggacccaggtcaccgtctcctca

SEQ ID NO: 4039 - DNA, 381 bp, synthetic construct
  source 1..381: mol_type = other DNA
gaggtgcagctggtggagtctgggggaggcttggtgcagcctggggggtctctgagactctcctgtgcggcctctgaattcactttggattattatgccataggctggttccgccaggccccagggaaggagcgtgagggaatttcatgtattagtagtagtggtgatgtcacgcactatgcagactccgtgaagggccgattcaccatctccagagacaacgccaagaacacggtgtatctgcagatgaacagcctggcacctgaggacacagccgtttattactgtgcagcctacgtttaccctgattactactgttcagaatatgtcctgttaaagtatgactactggggccaggggacccaggtcaccgtctcctca

SEQ ID NO: 4040 - DNA, 381 bp, synthetic construct
  source 1..381: mol_type = other DNA
gaggtgcagctggtggagtctgggggaggcttggtgcagcctggggggtctctgagactctcctgtgcagcctctggattcactttggattattatgccataggctggttccgccaggtcccagggaaggagcgtgagggggtctcatgtattagtagtagtggtgatagcacaaactatgcaaactccgtgaagggccgattcaccatctccagagacaacgccaagaacacggtgtcgctgcaaatgaacagcctgaaacctgaggacacagccgtttattactgtgcagcctacgtttaccctgattactactgttcagaatatatcctgttaaagtatgactactggggccaggggacccaggtcaccgtctcctca

SEQ ID NO: 4041 - DNA, 381 bp, synthetic construct
  source 1..381: mol_type = other DNA
gaggtgcagctggtggagtctgggggaggcttggtgcagcctgggggttctctgagactctcctgtgcagcctctggattcgctttggattattatgccataggctggttccgccaggccccagggaaggagcgtgagggtgtctcatgtattagtagtagtggtgatagcacaaactatgcagactccgtgaagggccgattcaccatctccagagacagcgccaagaacacggtgtatctgcaaatgaacagcctgaaacctgaggacacagccgtttattactgtgcagcctacgtttaccctgattactactgttcagaatatgtcctgttaaagtatgactactggggccaggggacccaggtcaccgtctcctca

SEQ ID NO: 4042 - DNA, 381 bp, synthetic construct
  source 1..381: mol_type = other DNA
gaggtgcagctggtggagtctgggggaggcttggtgcagcctggggggtctctgagactctcctgtgcagcctctggattcactttggattattatgccataggctggttccgccaggccccagggaaggagcgtgagggggtctcatgtattagtagtagtggtggtagcacaaactatgcagactccgtgaagggccgattcaccatctccagagacaacgccaagaacacggtgtatctgcaaatgaacagcctgaaacctgaggacacagccgtttattactgtgcagcctacgtttaccctgattactactgttcagaatatgtcaagttaaagtatgactactggggccaggggacccaggtcaccgtctcctca

SEQ ID NO: 4043 - DNA, 381 bp, synthetic construct
  source 1..381: mol_type = other DNA
gaggtgcagctggtggagtctgggggaggcttggtgcagcctggggggtctctgagactctcctgtgcagcctctggattcactttggattattattccataggctggttccgccaggccccagggaaggagcgtgagggggtctcatgtattagtagtagtggtgatagcacaaactatgcagactccgtgaagggccgattcaccatctccagagacaacgccaagaacacggtgtatctgcaaatgaacagcctgaaacctgaggacacagccgtttattactgtgcagcctacgtttaccctgattactactgttcagaatatgtcaagttaaagtatgactactggggccaggggacccaggtcaccgtctcctca

SEQ ID NO: 4044 - DNA, 381 bp, synthetic construct
  source 1..381: mol_type = other DNA
gaggtgcagctggtggagtctgggggaggcttggtgcagcctggggggtctctgagactctcctgtgcagcctctggattcactttggattattatgccataggctggttccgccaggccccagggaaggagcgtgagggggtctcatgtattagtagtagtggtgatagcacaaactatgcagactccgtgaagggccgattcaccatctccagagacaacgccaagaacacggtgtatctgcaaatgaacagcctgaaacctgaggacacagccgtttattactgtgcagcctacgtttaccctgattactactgttcagaatatgtcaagttaaagtatgactactggggccaggggacccaggtcaccgtctcctca

SEQ ID NO: 4045 - DNA, 381 bp, synthetic construct
  source 1..381: mol_type = other DNA
gaggtgcagctggtggagtctgggggaggcttggtgcagcctggggggtctctgagactctcctgtgcagcctctggattcactttggattattatgccataggctggttccgccaggccccagggaaggagcgtgagggggtctcatgtattagtagtagtggtgatagcacaaactatgcagactccgtgaagggccgattcaccatctccagagacaacgccaagaacacggtgtatctgcaaatgaacagcctgaaacctgaggacacagccgtttattactgtgcagcctacgtttaccctgattactactgctcagactatgtcctgttaaagtatgactactggggccaggggacccaggtcaccgtctcctca

SEQ ID NO: 4046 - DNA, 381 bp, synthetic construct
  source 1..381: mol_type = other DNA
gaggtgcagctggtggagtctgggggaggcttggtgcagcctggggggtctctgagactctcctgtgcagcctctggattcactttggattattatgccataggctggttccgccaggccccagggaaggagcgtgagggtgtctcatgtattagtagtagtggtggtagcacaaactatgcagactccgtgaagggccgattcaccatctccagagacaacgccaagaacacggtgtatctgcaaatgaacagcctgaaacctgaggacacagccgtttattactgtgcggcctacgtttaccctgattactactgttcagactatgtcctgttaaagtatgactactggggccaggggacccaggtcaccgtctcctca

SEQ ID NO: 4047 - DNA, 381 bp, synthetic construct
  source 1..381: mol_type = other DNA
gaggtgcagctggtggagtctgggggaggcttggtgcagcctggggggtctctgagactctcctgtgcagcctctggattcactttggattattatgccataggctggttccgccaggccccagggaaggagcgtgagggtgtctcatgtattagtagtagtggtggtagcacaaactatgcagactccgtgaagggccgattcaccatctccagagacaacgccaagaacacggtgtatctgcaaatgaacagcctgaaacctgaggacacagccgtttattactgtgcagcctacgtttaccctgattactactgttcagactatgacctgttaaggtatgactactggggccaggggacccaggtcaccgtctcctca

SEQ ID NO: 4048 - DNA, 381 bp, synthetic construct
  source 1..381: mol_type = other DNA
gaggtgcagctggtggagtctgggggaggcttggtgcagcctggggggtctctgagactctcctgtgcagcctctggattcactttggattattatgccataggctggttccgccaggcccccgggaaggagcgtgagggggtctcatgtattagtagtagtggcggtaacacaaactatgcggactccgtgaagggccgattcaccatctccagagacaacgccaagaacacggtgtatctgcaaatgaacagcctgaaaccagaggacacagccgtttattactgtgcagcctacgtttaccctgattactactgttcagactatgtcctgttaaagtatgactactggggccaggggacccaggtcaccgtctcctca

SEQ ID NO: 4049 - DNA, 381 bp, synthetic construct
  source 1..381: mol_type = other DNA
gaggtgcagctggtggagtctgggggaggcttggtgcagcctggggggtctctgagactctcctgtgcagcctctggattcactttggattattatgccataggctggttccgccaggccccagggaaggagcgtgagggtgtctcatgtattagtagtagtggtggtagcacaaactatgcagactccgtgaagggccgaagtaccatctccagagacaacgccaagaacacggtgtatctgcaaatgaacagcctgaaacctgaggacacagccgtttattactgtgcagcctacgtttaccctgattactactgttcagactatgacctgttaaggtatgactactggggccaggggacccaggtcaccgtctcctca

SEQ ID NO: 4050 - DNA, 381 bp, synthetic construct
  source 1..381: mol_type = other DNA
gaggtgcagctggtggagtctgggggaggcttggtgcagcctggggggtctctgagactctcctgtgcagcctctggattcactttggattattatgccataggctggttccgccaggccccagggaaggagcgtgagggggtctcatgtattagtagtagtggtgatagcacaaactatgcagactccgtgaagggccgattcaccatctccagagacaacgccaagaacacggtgtatctgcaaatgaacagcctgaaacctgaggacacagccgtttattactgtgcagcctacgtttaccctgattactactgttcaggctatgtcctgttagaatatgactactggggccaggggacccaggtcaccgtctcctca

SEQ ID NO: 4051 - DNA, 381 bp, synthetic construct
  source 1..381: mol_type = other DNA
gaggtgcagctggtggagtctgggggaggcttggtgcagcccggggggtctctgagactctcctgtgcagcctctggattcactttggattattatggcataggctggttccgccaggccccagggaaggagcgtgagggggtctcatgtattagtagtagtggtgatagcacgaactatgcagactccgtgaagggccgattcaccatctccagagacaacgccaagaacacggtgtatctgcaaatgaacagcctgaaacctgaggacacagccgtttattactgtgcagcctacgtttaccctgattactactgttcaggctatgtcctgttagagtatgactactggggccaggggacccaggtcaccgtctcctca

SEQ ID NO: 4052 - DNA, 381 bp, synthetic construct
  source 1..381: mol_type = other DNA
gaggtgcagctggtggagtctgggggaggcttggtgcagcctggggggtctctgagactctcctgtgcagcctctggattcactttggattattatgccataggctggttccgccaggccccagggaaggagcgtgagggggtcgcatgtattagtagtagtggtgatagtacaaactatgcagactccgtgaagggccgattcaccatctccagagacaacgccaagaacacggtgtatctgcaaatgaacagcctgaaacctgaggacacagccatttattactgtgcagcctacgtttaccctgattactactgttcagagtatgtcctgtcaaagtatgactactggggccaggggacccaggtcaccgtctcctca

SEQ ID NO: 4053 - DNA, 381 bp, synthetic construct
  source 1..381: mol_type = other DNA
gaggtgcagctggtggagtctgggggaggcttggcgcagcctggggggtctctgagactctcctgtgcagcctctggattcactttggattattattccataggctggttccgccaggccccagggaaggagcgtgagggggtctcatgtattagtagtagtggtgatagcacaaactatgcagactccgtgaagggccgattcaccatctccagagacaacgccaagaacacggtgtatctgcaaatgaacagcctgaaacctgaagacacagccgtttattactgtgcagcctacgtttaccctgattactactgttcaggctatgtcctgttagagtatgactactggggccaggggacccaggtcaccgtctcctca

SEQ ID NO: 4054 - DNA, 381 bp, synthetic construct
  source 1..381: mol_type = other DNA
gaggtgcagctggtggagtctgggggaggcttggtgcagcctggggggtctctgagactctcctgtgcagcctctggattcactttggattattatgccataggctggttccgccaggccccagggaaggagcgtgagggtgtctcatgtattagtagtagtggtggtagcacaaactatgcagactccgtgaagggccgattcaccatctccagagacaacgccaagaacacggtgtatctgcaaatgaacagcctgaaacctgaggacacagccgtttattactgtgcagcctacgtttaccctgattactactgttcagactatgtcctgtcaaggtatgactactggggccaggggacccaggtcaccgtctcctca

SEQ ID NO: 4055 - DNA, 381 bp, synthetic construct
  source 1..381: mol_type = other DNA
gaggtgcagctggtggagtctgggggaggcttggtgcagcctggggggtctctgagactctcctgtgcagcctctggattcactttggattattatgccataggctggttccgccaggccccagggaaggagcgtgagggggtctcatgtattagtagtagtggtggtagcacaaactatgcagactccgtgaagggccgattcaccatctccagagacaacgccaagaacacggtgtatctgcaaatgaacagcctgaaacctgaggacacagccgtttattactgtgcagcctacgtttaccctgattactactgttcagagtatgtcctgttaaggtatgactactggggccaggggacccaggtcaccgtctcctca

SEQ ID NO: 4056 - DNA, 381 bp, synthetic construct
  source 1..381: mol_type = other DNA
gaggtgcagctggtggagtctgggggaggcttggtgcagcctggggggtctctgagactctcctgtgcagcctctggattcactttggattattatgccataggctggttccgccaggccccagggaaggagcgtgagggtgtctcatgtattagtagtagtggtggtagcacaaactatgcagactccgtgaagggccgattcaccatctccagagacaacgccaagaacacggtgtatctgcaaatgaacagcctgaaacctgaggacacagccgtttattactgtgcggcctacgtttaccctgattactactgttcagactatgtcctgttaaggtatgactactggggccaggggacccaggtcaccgtctcctca

SEQ ID NO: 4057 - DNA, 381 bp, synthetic construct
  source 1..381: mol_type = other DNA
gaggtgcagctggtggagtctgggggaggcttggtgcagcctggggggtctctgagactctcctgtgcagcctctggattcactttggattattatgccataggctggttccgccaggccccagggaaggagcgtgagggtgtctcatgtattagtacgagtggtgatagcacaaactatgcagactccgtgaagggccgattcaccatctccagagacaacgccaagaacacggtgtatctgcaaatgaacagcctgaaacctgaggacacagccgtttattactgtgcagcctacgtttaccctgattactactgttcagattatgtcctgtcaaggtatgactactggggccaggggacccaggtcaccgtctcctca

SEQ ID NO: 4058 - DNA, 381 bp, synthetic construct
  source 1..381: mol_type = other DNA
gaggtgcagctggtggagtctgggggaggcttggtgcagcctggggggtctctgagactctcctgtgcagcctctggattcactttggattattacgccataggctggttccgccaggccccagggaaggagcgtgagggggtctcatgtattagtagagatggtggtagcacaaattatggagactccgtgaagggccgattcaccatctccagagacaatgccaagaacacggtgtatctgcaaatgaacagcctggaacctgaggacacagccgtttattactgtgcagcctacgtttaccctgattactactgttcagagtatgtcctgttaaggtatgactactggggccaggggacccaggtcaccgtctcctca

SEQ ID NO: 4059 - DNA, 381 bp, synthetic construct
  source 1..381: mol_type = other DNA
gaggtgcagctggtggagtctgggggaggcttggtgcagcctggggggtctctgagactctcctgtgcagcctctggattcactttggattattatgccataggctggttccgccaggccccagggaaggagcgtgagggggtctcatgtattagtagtagtggtggtagcacaaactatgcagactccgtgaagggccgattcaccatctccagagacaccgccaagaacacggtgtatctgcaaatgaacagcctgaaacctgaggacacagccgtttattactgtgcagcctacgtttaccctgattactactgttcagactatgacctgttaaggtatgactactggggccaggggacccaggtcaccgtctcctca

SEQ ID NO: 4060 - DNA, 381 bp, synthetic construct
  source 1..381: mol_type = other DNA
gaggtgcagctggtggagtctgggggaggcttggtgcagcctggggggtctctgagactctcctgtgcagcctctggattcactttggattattatgccataggctggttccgccaggccccagggaaggagcgtgagggtgtctcatgtattagtagtagtggtggtagcacaaactatgcagactccgtgaagggccgattcaccatctccagagacaacgccaagaacacggtgtatctgcaaatgaacagcctgaaacctgaggacacagccgtttattactgtgcagcctacgtttaccctgattactactgttcagactatgtcccgttaaggtatgactactggggccaggggacccaggtcaccgtctcctca

SEQ ID NO: 4061 - DNA, 381 bp, synthetic construct
  source 1..381: mol_type = other DNA
gaggtgcagctggtggagtctgggggaggcttggtgcagcctggggggtctctgagactctcctgtgcagcctctggattcactttggattattatgccataggctggttccgccaggccccagggaaggagcgtgagggtgtctcatgtattagtacgagtggtgatagcacaaactatgcagactccgtgaagggccgattcaccatctccagagacaacgccaagaacacggtgtatctgcaaatgaacagcctgaaacctgaggacacagccgtttattactgtgcagcctacgtttaccctgattactactgttcagattatgtcccgttaaggtatgactactggggccaggggacccaggtcaccgtctcctca

SEQ ID NO: 4062 - DNA, 381 bp, synthetic construct
  source 1..381: mol_type = other DNA
gaggtgcagctggtggagtctgggggaggcttggtgcagcctggggggtctctgagactctcctgtgcagcctctggattcactttggattattatgccataggctggttccgccaggccccagggaaggagcgtgagggggtctcatgtattagtagtagtggtggtagcacaaactatgcagactccgtgaagggccgattcaccatctccagagacaacgccaagaacacggtgtatctgcaaatgaacagcctgaaacctgaggacacagccgtttattactgtgcagcctacgtttaccctgagtactactgttcagaatatgtcccgttaaggtatgactactggggccaggggacccaggtcaccgtctcctca

SEQ ID NO: 4063 - DNA, 381 bp, synthetic construct
  source 1..381: mol_type = other DNA
gaggtgcagctggtggagtctgggggaggcttggtgcagcctggggggtctctgagactctcctgtgcagcctctggattcactttggattattatgccataggctggttccgccaggccccagggaaggagcgtgagggtgtctcatgtattagtagtagtggtgatagcacaaactatgcagactccgtgaagggccgattcaccatctccagagacaacgccaagaacacggtgactctgcaaatgagcagcctgaaacctgaggacacagccgtttattactgtgcagcctacgtttaccctgattactactgttcagaatatgccctgttaaaatatgactactggggccaggggacccaggtcaccgtctcctca

SEQ ID NO: 4064 - DNA, 381 bp, synthetic construct
  source 1..381: mol_type = other DNA
gaggtgcagctggtggagtctgggggaggcttggtgcagcctggggggtctctgagactctcctgtgcagcctctggattcactttggattattatgccataggctggttccgccaggccccagggaaggagcgtgagggtgtctcatgtattagtagtagtggtggtagcactaactatgcagactccgtgaagggccgattcaccatctccagagacaacgccaagaacacggtgtatctgcaaatgaacagcctgaaacctgaggacacagccgtttattactgtgcagcctacgttgaccctgattattactgttcagaatatgtcctgttaaagtatgactactggggccaggggacccaggtcaccgtctcctca

SEQ ID NO: 4065 - DNA, 381 bp, synthetic construct
  source 1..381: mol_type = other DNA
gaggtgcagctggtggagtctgggggaggcttggtgcagcctggggggtctctgagactctcctgtgcagcctctggattcactttggattattatgccataggctggttccgccaggccccagggaaggagcgtgagggtgtctcatgtattagtagtagtggtggtagcacaaactatgcagactccgtgaagggccgattcaccatctccagagacaacgccaagaacacggtgtatctgcaaatgaacagcctgaaacctgaggacacagccgtttattactgtgcagcctacgattaccctgattattactgttcagaatatgtcctgttaaagtatgactactggggccaggggacccaggtcaccgtctcctca

SEQ ID NO: 4066 - DNA, 381 bp, synthetic construct
  source 1..381: mol_type = other DNA
gaggtgcagctggtggagtctggggggggcttggtgcagcctggggggtctctgagactctcctgtgcagcctctggattcactttggattattatgccataggctggttccgccaggccccagggaaggagcgtgagggtgtctcatgtattagtagtagtggtggtagcacaaactatgcagactccgtgaagggccgattcaccatctccagagacaacgccaagaacacggtgtatctgcaaatgaacagcctgaaaccagaggacacagccgtttattactgtgcagcctacgtttaccctgatgattactgttcagaatatgtcctgttaaagtatgactactggggccaggggacccaggtcaccgtctcctca

SEQ ID NO: 4067 - DNA, 381 bp, synthetic construct
  source 1..381: mol_type = other DNA
gaggtgcagctggtggagtctgggggaggcttggtgcagcctggggggtctctgagactctcctgtgcagcctctggattcactttggattattatgccataggctggttccgccaggccccagggaaggagcgtgagggtgtctcatgtattagtagtagtggtggtagcacaaactatgcagactccgtgaagggccgattcaccatctccagagacaacgccaagaacacggtgtatctgcaaatgaacagcctgaaacctgaggacacagccgtttattactgtgcagcctacgtttaccctgattatgactgttcagaatatgtcctgttaaagtatgactactggggccaggggacccaggtcaccgtctcctca

SEQ ID NO: 4068 - DNA, 381 bp, synthetic construct
  source 1..381: mol_type = other DNA
gaggtgcagctggtggagtctgggggaggcttggtgcagcctggggggtctctgagactctcctgtgcagcctctggattcactttggattattatgccataggctggttccgccaggccccagggaaggagcgtgagggtgtctcatgtattagtagtagtggtggtagcacaaactatgcagactccgtgaagggccgattcaccatctccagagacaacgccaagaacacggtgtatctgcaaatgaacagcctgaaacctgaggacacagccgtttattactgtgcagcctacgtttaccctgattattactgttcagaatatgccctgttaaagtatgactactggggccaggggacccaggtcaccgtctcctca

SEQ ID NO: 4069 - DNA, 381 bp, synthetic construct
  source 1..381: mol_type = other DNA
gaggtgcagctggtggagtctgggggaggcttggtgcagcctggggggtctctgagactctcctgtgcagcctctggattcactttggattattatgccataggctggttccgccaggccccagggaaggagcgtgagggggtctcatgcattagtagtagtggtgatagcacaaactatgcagactccgtgaagggccgattcaccatctccagagacaacgccaagaacacggtgtatctgcaaatgaacagcctgaaacctgaggacacagccgtttattactgtgcagcctacgtttaccctgattactactgttcagactatgtcctgtcaaggtatgactactggggccaggggacccaggtcaccgtctcctca

SEQ ID NO: 4070 - DNA, 381 bp, synthetic construct
  source 1..381: mol_type = other DNA
gaggtgcagctggtggagtctgggggaggcttggtgcagcctggggggtctctgagactctcctgtgtagcctctggattcactttggattattatgccataggctggttccgccaggccccagggaaggagcgtgagggtgtctcatgtattagtagtagtggtgatagcacaaactatgcagactccgtgaagggccgattcaccatctccagagacaacgccaagaacacggtgtatctgcaaatgaacagcctgaaacctgaggacacagccgtttattactgtgcagcctacgtttaccctgattactactgttcagaatatgccctgttaaagtatgactactggggccaggggacccaggtcaccgtctcctca

SEQ ID NO: 4071 - DNA, 381 bp, synthetic construct
  source 1..381: mol_type = other DNA
gaggtgcagctggtggagtctgggggaggcttggtgcagcctggggggtctctgagactctcctgtgcagcctctggattcactttggattattatgccataggctggttccgccaggccccagggaaggagcgtgagggggtctcatgtattagtagtagtggtggtagcacgaactatgcagactccgtgaagggccgattcaccatctccagagacaacgccaagaacacggtgtatctgcaaatgaacagcctgaaacctgaggacacagccgtttattactgtgcagcctacgtttaccctgattactactgttcagagtatgccctgttcaggtatgactactggggccaggggacccaggtcaccgtctcctca

SEQ ID NO: 4072 - DNA, 381 bp, synthetic construct
  source 1..381: mol_type = other DNA
gaggtgcagctggtggagtctgggggaggcttggtgcagcctggggggtctctgagactctcctgtgcagcctctggattcactttggattattatgccataggctggttccgccaggccccagggaaggagcgtgagggggtctcatgtattagtagtagtggtggtagcacaaactatgcaggctccgtgaagggccgattcaccatctccagagacaacgccaagaacacggtgtatctgcaaatgaacagcctgaaacctgaggacacagccgtttattactgtgcagcctacgtttaccctgattacttctgttcagagtatgacctgttaaggtatgactactggggccaggggacccaggtcaccgtctcctca

SEQ ID NO: 4073 - DNA, 381 bp, synthetic construct
  source 1..381: mol_type = other DNA
gaggtgcagctggtggagtctgggggaggcttggtgcagcctggggggtctctgagactctcctgtgcagcctctggattcactttggattattatgccataggctggttccgccaggccccagggaaggagcgtgagggtgtctcatgtattagtagtagtggtggtagcacaaactatgcagactccgtgaagggccgattcaccatctccagagacaacgccaagaacacggtgtatctgcaaatgaacagcctgaaacctgaggacacagccgtttattactgtgcagcctacgtttaccctgatcattactgttcagaatatgtcctgttaaagtatgactactggggccaggggacccaggtcaccgtctcctca

SEQ ID NO: 4074 - DNA, 381 bp, synthetic construct
  source 1..381: mol_type = other DNA
gaggtgcagctggtggagtctgggggaggcttggtgcagcctggggggtctctgagactctcctgtgcagcctctggattcactttggattattatgccataggctggttccgccaggccccagggaaggagcgtgagggtgtctcatgtattagtagtagtggtggtagcacaaactatgcagactccgtgaagggccgattcaccatctccagagacaacgccaagaacacggtgtatctgcaaatgaacagcctgaaacctgaggacacagccgtttattactgtgcagcctacgtttaccctgagtattactgttcagaatatgtcctgttaaagtatgactactggggccaggggacccaggtcaccgtctcctca

SEQ ID NO: 4075 - DNA, 381 bp, synthetic construct
  source 1..381: mol_type = other DNA
gaggtgcagctggtggagtctgggggaggcttggtgcagcctggggggtctctgagactctcctgtgcagcctctggattcactttggattattatgccataggctggttccgccaggccccagggaaggagcgtgagggtgtctcatgtattagtagtagtggtggtagcacaaactatgcagactccgtgaagggccgattcaccatctccagagacaacgccaagaacacggtgtatctgcaaatgagcagcctgaaacctgaggacacagccgtttattactgtgcagcctacgtttaccctgattactactgttcagagtatgccctgtcaaggtatgactactggggccaggggacccaggtcaccgtctcctca

SEQ ID NO: 4076 - DNA, 393 bp, synthetic construct
  source 1..393: mol_type = other DNA
gaggtgcagctggtggagtctgggggaggcttggtgcagcctggggggtctctgagactctcctgtgcagcctctggattcactttggattattatgccataggctggttccgccaggccccagggaaggagcgtgagggggtctcatgcattcgtactgagattagtagtactggtgataccacaaactatgcagactccgtgaagggccgattcaccatctccagagacaacgccaagaatacggtgtatctgcaaatgaacagcctgaaacctgaggacacagccgtttattactgtgcagcctacgtttaccctgattactactgttcagagtatgtcctgtctaggtatgaccactggggccaggggacccaggtcaccgtctcctca

SEQ ID NO: 4077 - DNA, 381 bp, synthetic construct
  source 1..381: mol_type = other DNA
gaggtgcagctggtggagtctgggggaggcttggtgcagcctggggggtctctgagactctcctgtgcagcctctggattcactttggattattatgccataggctggttccgccaggccccagggaaggagcgtgagggtgtctcatgtattagtagtagtggtggtagcacaaactatgcagactccgtgaagggccgattcaccatctccagagacaacgccaagaacacggtgtatctgcaaatgaacagcctgaaacctgaggacacagccgtttattactgtgcagcctacgtttaccctgatgactactgttcagaatatgtcccgttaaggtatgactactggggccaggggacccaggtcaccgtctcctca

SEQ ID NO: 4078 - DNA, 381 bp, synthetic construct
  source 1..381: mol_type = other DNA
gaggtgcagctggtggagtctgggggaggcttggtgcagcctggggggtctctgagactctcctgtgcagcctctggattcactttggattattatgccataggctggttccgccaggccccagggaaggagcgtgagggtgtctcatgtattagtagtagtggtggtagcacaaactatgcagactccgtgaagggccgattcaccatctccagagacaacgccaagaacacggtgtatctgcaaatgaacagcctgaaacctgaggacacagccgtttattactgtgcagcctccgtttaccctgattattactgttcagaatatgtcctgttaaagtatgactactggggccaggggacccaggtcaccgtctcctca

SEQ ID NO: 4079 - DNA, 381 bp, synthetic construct
  source 1..381: mol_type = other DNA
gaggtgcagctggtggagtctgggggaggcttggtgcagcctggggggtctctgagactctcctgtgcagcctctggattcactttggattattatgccataggctggttccgccaggccccagggaaggagcgtgagggtgtctcatgtattagtagtagtggtggtagcacaaactatgcagactccgtgaagggccgattcaccatctccagagacaacgccaagaacacggtgtatctgcaaatgaacagcctgaaacctgaggacacagccgtttattactgtgcagcctacgtttaccctgattactactgttcagaatatgtcctgtcaaagtatgactactggggccaggggacccaggtcaccgtctcctca

SEQ ID NO: 4080 - DNA, 381 bp, synthetic construct
  source 1..381: mol_type = other DNA
gaggtgcagctggtggagtctgggggaggcttggtgcagcctggggggtctctgagactctcctgtgcagcctctggattcatcatggattattatgccataggctggttccgccaggccccagggaaggagcgtgagggtgtctcctgtattagtagtagtggtgatagcacaaactatgcagactccgtgaagggccgattcaccatctccagagacaacgccaagaacacggtgtatctgcaaatgaacagcctgaaacctgaggacacagccgtttattactgtgcagcctacgtttaccctgatcactactgttcagaatatgttctgttaaagtatgactactggggccaggggacccaggtcaccgtctcctca

SEQ ID NO: 4081 - DNA, 381 bp, synthetic construct
  source 1..381: mol_type = other DNA
gaggtgcagctggtggagtctgggggaggcttggtgcagcctggggggtctctgagactctcctgtgcagcctctggattcactttggattattatgccataggctggttccgccaggccccagggaaggagcgtgagggtgtctcatgtattagtagtagtggtgatagcacaaactatgcagactccgtgaagggccgattcaccatctccagagacaacgccaagaacacggtgtatctgcaaatgaacagcctgaaacctgaggacacagccgtttattactgtgcagcctacgtttaccctgattactactgttcagaatatgtcctgtcaaagtatgactactggggccaggggacccaggtcaccgtctcctca

SEQ ID NO: 4082 - DNA, 381 bp, synthetic construct
  source 1..381: mol_type = other DNA
gaggtgcagctggtggagtctgggggaggcttggtgcagcctggggggtctctgagactctcctgtgcagcctctggattcactttggattattatgccataggctggttccgccaggccccagggaaggaacgtgagggtgtctcatgtattagtagtagtggtggtagcacaaactatgcagactccgtgaagggccgattcaccatctccagagacaatgccaggaacacggtgtatctgcaaatgaacagcctgaaacctgaggacacagccgtttattactgtgcagcctacgtttaccctgattactactgtccagaatatgtcctgtcaaggtatgactactggggccaggggacccaggtcaccgtctcctca

SEQ ID NO: 4083 - DNA, 381 bp, synthetic construct
  source 1..381: mol_type = other DNA
gaggtgcagctggtggagtctgggggaggcttggcgcagcctggggggtctctgagactctcctgtgcagcctctggattcactttggattattatgccataggctggttccgccaggccccagggaaggagcgtgagggtgtctcatgtattagtagtagtggtggtagcacaaactatgcagactccgtgaagggccgattcaccatctccagagacaacgccaagaacacggtgtatctgcaaatgaacagcctgaaacctgaggacacagccgtttattactgtgcagcctacgtttaccctgattactactgttcagactatgacctgttaaggtatgactactggggccaggggacccaggtcaccgtctcctca

SEQ ID NO: 4084 - DNA, 381 bp, synthetic construct
  source 1..381: mol_type = other DNA
gaggtgcagctggtggagtctgggggaggcttggtgcagcctggggggtctctaagactctcctgtgcagcctctggattcactttggattattatgccataggctggttccgccaggccccagggaaggagcgtgagggtgtctcatgtattagtagtagtggtggtagcacaaactatgcagactccgtgaagggccgattcaccatctccagagacaacgccaagaacacggtgtatctgcaaatgaacagcctgaaacctgaggacacagccgtttattactgtgcagcctacgcttaccctgattattactgttcagaatatgtcctgttaaagtatgactactggggccaggggacccaggtcaccgtctcctca

SEQ ID NO: 4085 - DNA, 381 bp, synthetic construct
  source 1..381: mol_type = other DNA
gaggtgcagctggtggagtctgggggaggcttggtgcagcctggggggtctctgagactctcctgtgcagcctctggattcactttggattattatgccataggctggttccgccaggccccagggaaggagcgtgagggtgtctcatgtattagtagtagtggtggtagcacaaactatgcagactccgtgaagggtcgattcaccatctccagagacaacgccaagaacacggtgtatctgcaaatgaacagcctgaaacctgaggacacagccgtttattactgtgcagcctacgtttcccctgattattactgttcagaatatgtcctgttaaagtatgactactggggccaggggacccaggtcaccgtctcctca

SEQ ID NO: 4086 - DNA, 381 bp, synthetic construct
  source 1..381: mol_type = other DNA
gaggtgcagctggtggagtctgggggaggcttggtgcagcctggggggtctctgagactctcctgtgcagcctctggattcactttggattattatgccataggctggttccgccaggccccagggaaggagcgtgagggggtctcatgtattagtagtagtggcggtaacacaaactatgcggactccgtgaagggccgattcaccatctccagagacaacgccaagaacacggtgtatctgcaaatgaacagcctgaaaccagaggacacagccgtttattactgtgcagcctacgcttaccctgattactactgttcagactatgtcctgtttaagtatgactactggggccaggggacccaggtcaccgtctcctca

SEQ ID NO: 4087 - DNA, 381 bp, synthetic construct
  source 1..381: mol_type = other DNA
gaggtgcagctggtggagtctgggggaggcttggtgcagcctggggggtctctgagactctcctgtgcagcctctggattcactttggattattatgccataggctggttccgccaggccccagggaaggagcgtgagggtgtctcatgtatcagtagtagtggtggtagcacaaactatgcagactccgtgaagggccgattcaccatctccagagacaacgccaagaacacggtgtatctgcaaatgaacagcctgaaacctgaggacacagccgtttattactgtgcagcctacgtttaccctgattactactgttcagaatatatcccgttaaggtatgactactggggccaggggacccaggtcaccgtctcctca

SEQ ID NO: 4088 - DNA, 381 bp, synthetic construct
  source 1..381: mol_type = other DNA
gaggtgcagctggtggagtctgggggaggcttggtgcagcctggggggtctctgagactctcctgtgcagcctctggattcactttggattattatgccataggctggttccgccaggccccagggaaggagcgtgagggtgtctcatgtattagtagtagtggtggtagcacaaactatgcagactccgtgaagggccgattcaccatctccagagacaacgccaagaacacggtgtatctgcaaatgaacagcctgaaacctgaggacacagccgtttattactgtgcagcctacgtttaccctgattattactgttcagaatatgtcctgataaagtatgactactggggccaggggacccaggtcaccgtctcctca

SEQ ID NO: 4089 - DNA, 381 bp, synthetic construct
  source 1..381: mol_type = other DNA
gaggtgcagctggtggagtctgggggaggcttggtgcagcctggggggtctctgagactctcctgtgcagcctctggattcactttggattattatgccataggctggttccgccaggccccagggaaggagcgtgagggtgtctcatgtattagtagtagtggtggtagcacaaactatgcagactccgtgaagggccgattcaccatctccagagacaacgccaagaacacggtgtatctgcaaatgaacagcctgaaacctgaggacacagccgtttattactgtgcagcctacgtttacccttattattactgttcagaatatgtcctgttaaagtatgactactggggccaggggacccaggtcaccgtctcctca

SEQ ID NO: 4090 - DNA, 381 bp, synthetic construct
  source 1..381: mol_type = other DNA
gaggtgcagctggtggagtctgggggaggcttggtgcagcctggggggtctctgagactctcctgtgcggcctctggattcactttggattattatgccataggctggttccgccaggccccagggaaggagcgtgagggggtctcatgtattagtagtagtggtggtagcacaaactatgcagactccgtgaagggccgattcaccatctccagagacaacgccaagaacacggtgtatctgcaaatgaacagcctgaaacctgaggacacagccgtttattactgtgcagcctccgtttaccctgattactactgttcagactatgtcctgttaaggtatgactactggggccaggggacccaggtcaccgtctcctca

SEQ ID NO: 4091 - DNA, 381 bp, synthetic construct
  source 1..381: mol_type = other DNA
gaggtgcagctggtggagtctgggggaggcttggtgcagcctggggggtctctgagactctcctgtgcagcctctggattcatcatggattattatgccataggctggttccgccaggccccagggaaggagcgtgagggtgtctcctgtattagtagtagtggtgatagcacaaactatgcagactccgtgaagggccgattcaccatctccagagacaacgccaagaacacggtgtatctgcaaatgaacagcctgaaacctgaggacacagccgtttattactgtgcagcctacgtttaccctgattactactgttcagaatatgttctgttaaagtatgaccactggggccaggggacccaggtcaccgtctcctca

SEQ ID NO: 4092 - DNA, 381 bp, synthetic construct
  source 1..381: mol_type = other DNA
gaggtgcagctggtggagtctgggggaggcttggtgcagcctggggggtctctgagactctcctgtgcagcctctggattcactttggattattatgccataggctggttccgccaggccccagggaaggagcgtgagggtgtctcatgtattagtagtagtggtggtagcacaaactatgcagactccgtgaagggccgattcaccatctccagagacaacgccaagaacacggtgtatctgcaaatgaacagcctgaaacctgaggacacagccgtttattactgtgcagcctacgtttaccctgattattactgtacagaatatgtcctgttaaagtatgactactggggccaggggacccaggtcaccgtctcctca

SEQ ID NO: 4093 - DNA, 381 bp, synthetic construct
  source 1..381: mol_type = other DNA
gaggtgcagctggtggagtctgggggaggcttggtgcagcctggggggtctctgagactctcctgtgcagcctctggattcactttggattattatgccataggctggttccgccaggccccagggaaggagcgtgagggggtctcatgcattagtagtagtggtgatagcacaaactatgcagactccgtgaagggccgattcaccatctccagagacaacgccaagaacacggtgtatctgcaaatgaacagcctgaaacctgaggacacagccgtttattactgtgcagcctacgtttactctgattactactgttcagactatgtcctgttaaggtatgactactggggccaggggacccaggtcaccgtctcctca

SEQ ID NO: 4094 - DNA, 381 bp, synthetic construct
  source 1..381: mol_type = other DNA
gaggtgcagctggtggagtctgggggaggcttggtgcagcctggggggtctctgagactctcctgtgcagcctctggattcactttggattattatgccataggctggttccgccaggccccagggaaggagcgtgagggtgtctcatgtattagtagtagtggtggtagcacaaactatgcagactccgtgaagggccgattcaccatctccagagacaacgccaagaacacggtgtatctgcaaatgaacagcctgaaacctgaggacacagccgtttattactgtgcagcctacgtttaccctgagtactactgttcagaatatgtcctgtcaaggtatgactactggggccaggggacccaggtcaccgtctcctca

SEQ ID NO: 4095 - DNA, 381 bp, synthetic construct
  source 1..381: mol_type = other DNA
gaggtgcagctggtggagtctgggggaggcttggtgcagcctggggggtctctgagactctcctgtgcagcctctggattcactttggattattacgccataggctggttccgccaggccccagggaaggagcgtgagggggtctcatgtattagtagagatggtggtagcacaaattatggagactccgtgaagggccgattcaccatctccagagacaatgccaagaacacggtgtatctgcaaatgaacagcctggaacctgaggacacagccgtttattactgtgcagcctacgtttaccctgattactactgtacagagtatgtccagttaaggtatgactactggggccaggggacccaggtcaccgtctcctca

SEQ ID NO: 4096 - DNA, 381 bp, synthetic construct
  source 1..381: mol_type = other DNA
gaggtgcagctggtggagtctgggggaggcttggtgcagcctggggggtctctgagactctcctgtgcagcctctggattcactttggattattatgccataggctggttccgccaggccccagggaaggagcgtgagggtgtctcatgtattagtacgagtggtgatagcacaaactatgcagactccgtgaagggccgattcaccatctccagagacaacgccaagaacacggtgtatctgcaaatgaacagcctgaaacctgaggacacagccgtttattactgtgcagcctacgtttaccctgattactactgttcagattatgtccagttaaggtatgactactggggccaggggacccaggtcaccgtctcctca

SEQ ID NO: 4097 - DNA, 381 bp, synthetic construct
  source 1..381: mol_type = other DNA
gaggtgcagctggtggagtctgggggaggcttggtgcagcctggggggtctctgagactctcctgtgcagcctctggattcactttggattattatgccataggctggttccgccaggccccagggaaggagcgtgagggtgtctcatgtattagtagtagtggtggtagcacaaactatgcagactccgtgaagggccgattcaccatctccagagacaacgccaagaacacggtgtatctgcaaatgaacagcctgaaacctgaggacacagccgtttattactgtgcagcctacgttgaccctgattactactgttcagaatatgtcccgttaaggtatgactactggggccaggggacccaggtcaccgtctcctca

SEQ ID NO: 4098 - DNA, 381 bp, synthetic construct
  source 1..381: mol_type = other DNA
gaggtgcagctggtggagtctgggggaggcttggtgcagcctggggggtctctgagactctcctgtgcagcctctggattcactttggattattatgccataggctggttccgccaggccccagggaaggagcgtgagggtgtctcatgtattagtagtagtggtggtagcacaaactatgcagactccgtgaagggccgattcaccatctccagagacaacgccaagaacacggtgtatctgcaaatgaacagcctgaaacctgaggacacagccgtttattactgtgcagcctacgtttacactgattactactgttcagactatgtcctgttaaggtatgactactggggccaggggacccaggtcaccgtctcctca

SEQ ID NO: 4099 - DNA, 381 bp, synthetic construct
  source 1..381: mol_type = other DNA
gaggtgcagctggtggagtctgggggaggcttggtgcagcctggggggtctctgagactctcctgtgcagcctctggattcactttggattattatgccataggctggttccgccaggccccagggaaggagcgtgagggtgtctcatgtattagtagtagtggtggtagcacaaactatgcagactccgtgaagggccgattcaccatctccagagacaacgccaagaacacggtgtatctgcaaatgaacagcctgaaacctgaggacacagccgtttattactgtgcagcctacgtttaccctgattattactgttcagaatatgtcctgttaaagtatgcctactggggccaggggacccaggtcaccgtctcctca

SEQ ID NO: 4100 - DNA, 381 bp, synthetic construct
  source 1..381: mol_type = other DNA
gaggtgcagctggtggagtctgggggaggcttggtgcagcctggggggtctctgagactctcctgtgcagcctctggattcactttggattattatgccataggctggttccgccaggccccagggaaggagcgtgagggtgtctcatgtattagtagtagtggtggtagcacaaactatgcagactccgtgaagggccgattcaccatctccagagacaacgccaagaacacggtgtatctgcaaatgaacagcctgaaacctgaggacacagccgtttattactgtgcagcctacgtttaccctgattattactgttcagaatatgtcctgttaaagtatgaccactggggccaggggacccaggtcaccgtctcctca

SEQ ID NO: 4101 - DNA, 381 bp, synthetic construct
  source 1..381: mol_type = other DNA
gaggtgcagctggtggagtctgggggaggcttggtgcagcctggggggtctctgagactctcctgtgcagcctctggattcactttggattattatgccataggctggttccgccaggccccagggaaggagcgtgagggtgtctcatgtattagtagtagtggtggtagcacaaactatgcagactccgtgaagggccgattcaccatctccagagacaacgccaagaacacggtgtatctgcaaatgaacagcctgaaacctgaggacacagctgtttattactgtgcagcctacgtttactctgattactactgttcagaatatgtcctgtcaaggtatgactactggggccaggggacccaggtcaccgtctcctca

SEQ ID NO: 4102 - DNA, 381 bp, synthetic construct
  source 1..381: mol_type = other DNA
gaggtgcagctggtggagtctgggggaggcttggtgcagcctggggggtctctgagactctcctgtgcagcctctggattcactttggattattatgccataggctggttccgccaggccccagggaaggagcgtgagggggtctcatgtattagtagtagtggcggtaacacaaactatgcggactccgtgaagggccgattcaccatctccagagacaacgccaagaacacggtgtatctgcaaatgaacagcctgaaaccagaggacacagccgtttattactgtgcaacctacgtttaccctgattactactgttcagactatgtcctgtcaaagtatgactactggggccaggggacccaggtcaccgtctcctca

SEQ ID NO: 4103 - DNA, 381 bp, synthetic construct
  source 1..381: mol_type = other DNA
gaggtgcagctggtggagtctgggggaggcttggtgcagcctggggggtctctgagactctcctgtgcagcctctggattcactttggattattatgccataggctggttccgccaggccccagggaaggagcgtgagggggtctcatgtattagtagtagtggtggtagcacaaactatgcagactccgtgaagggccgattcaccatctccagagacaacgccaagaacacggtgtatctgcaaatgaacagcctgaaacctgaggacacagccgtttattactgtgcagcctacgtttaccctgagtactactgttcagactatgtcctgttaaggtatgactactggggccaggggacccaggtcaccgtctcctca

SEQ ID NO: 4104 - DNA, 381 bp, synthetic construct
  source 1..381: mol_type = other DNA
gaggtgcagctggtggagtctgggggaggcttggtgcagcctggggggtctctgagactctcctgtgcagcctctggattcactttggattattatgccataggctggttccgccaggccccagggaaggagcgtgagggtgtctcatgtattagtagtagtggtgatagcacaaactatgcagactccgtgaagggccgattcaccatctccagagacaacgccaagaacacggtgtatctgcaaatgaacagcctgaaacctgaggacacagccgtttattactgtgcagtctacgtttaccctgattactactgttcagaatatgtcctgttaaagtatgactactggggccaggggacccaggtcaccgtctcctca

SEQ ID NO: 4105 - DNA, 381 bp, synthetic construct
  source 1..381: mol_type = other DNA
gaggtgcagctggtggagtctgggggaggcttggtgcagcctggggggtctctgagactctcctgtgcagcctctggattcatcatggattattatgccataggctggttccgccaggccccagggaaggagcgtgagggtgtctcctgtattagtagtagtggtgatagcacaaactatgcagactccgtgaagggccgattcaccatctccagagacaacgccaagaacacggtgtatctgcaaatgaacagcctgaaacctgaggacacagccgtttattactgtgcagcctacgtttaccctgagtactactgttcagaatatgttctgttaaagtatgactactggggccaggggacccaggtcaccgtctcctca

SEQ ID NO: 4106 - DNA, 393 bp, synthetic construct
  source 1..393: mol_type = other DNA
gaggtgcagctggtggagtctgggggaggcttggtgcaacctggggggtctctgagactctcctgtgcagcctctggattcactttggattattatgccataggctggttccgccaggccccagggaaggagcgtgagggggtctcatgcattcgtactgagattagtagtactggtgataccacaaactatgcagactccgtgaagggccgattcaccatctccagagacaacgccaagaatacggtgtatctgcaaatgaacagcctgaaacctgaggacacagccgtttattactgtgcagcctacgtttaccctgagtactactgttcagagtatgtcctgtctaggtatgactactggggccaggggacccaggtcaccgtctcctca

SEQ ID NO: 4107 - DNA, 381 bp, synthetic construct
  source 1..381: mol_type = other DNA
gaggtgcagctggtggagtctgggggaggcttggtgcagcctggggggtctctgagactctcctgtgcagcctctggattcactttggattattatgccataggctggttccgccaggccccagggaaggagcgtgagggtgtctcatgtattagtagtagtggtgatagcacaaactatgcagactccgtgaagggccgattcaccatctccagagacaacgccaagaacacggtgtatctgcaaatgaacagcctgaaacctgaggacacagccgtttattactgtgcagcctacgtttaccctgagtactactgttcagaatatgtcctgttaaagtatgactactggggccaggggacccaggtcaccgtctcctca

SEQ ID NO: 4108 - DNA, 381 bp, synthetic construct
  source 1..381: mol_type = other DNA
gaggtgcagctggtggagtctgggggaggcttggtgcagcctggggggtctctgagactctcctgtgcagcctctggattcactttggattattatgccataggctggttccgccaggccccagggaaggagcgtgagggtgtctcatgtattagtagtagtggtgatagcacaaactatgccgactccgtgaagggccgattcaccatctccagagacaacgccaagaacacggtgtatctgcaaatgaacagcctgaaacctgaggacacagccgtttattactgtgcagcctacgttgaccctgattactactgttcagagtatgtcctgttaaagtatgactactggggccaggggacccaggtcaccgtctcctca

SEQ ID NO: 4109 - DNA, 381 bp, synthetic construct
  source 1..381: mol_type = other DNA
gaggtgcagctggtggagtctgggggaggcttggtgcagcctggggggtctctgagactctcctgtgcagcctctggattcactttggattattatgccataggctggttccgccaggccccagggaaggagcgtgagggtgtctcatgtattagtagtagtggtggtagcacaaactatgcagactccgtgaagggccgattcaccatctccagagacaacgccaagaacacggtgtatctgcaaatgagcagcctgaaacctgaggacacagccgtttattactgtgcagcctacgtttaccctgattactactgttcagactatgacctgtcaaggtatgaccactggggccaggggacccaggtcaccgtctcctca

SEQ ID NO: 4110 - DNA, 381 bp, synthetic construct
  source 1..381: mol_type = other DNA
gaggtgcagctggtggagtctgggggaggcttggtgcagcctggggggtctctgagactctcctgtgcagcctctggattcactttggattattacgccataggctggttccgccaggccccagggaaggagcgtgagggggtctcatgtattagtagagatggtggtagcacaaattatggagactccgtgaagggccgattcaccatctccagagacaatgccaagaacacggtgtatctgcaaatgaacagcctggaacctgaggacacagccgtttattactgtgcagcctacgtttaccctgataactactgttcagagtatatcctgttaaggtatgactactggggccaggggacccaggtcaccgtctcctca

SEQ ID NO: 4111 - DNA, 381 bp, synthetic construct
  source 1..381: mol_type = other DNA
gaggtgcagctggtggagtctgggggaggcttggtgcagcctggggggtctctgagactctcctgtgcagcctctggattcactttggattattatgccataggctggttccgccaggccccagggaaggagcgtgagggggtctcatgtattagtagtagtggtggtagcacaaactatgcagactccgtgaagggccgattcaccatctccagagacaacgccaagaacacggtgtatctgcaaatgaacagcctgaaacctgaggacacagccgtttattactgtgcagcctacgtttaccctgatttctactgttcagaatatgtcccgttaaggtatgactactggggccaggggacccaggtcaccgtctcctca

SEQ ID NO: 4112 - DNA, 381 bp, synthetic construct
  source 1..381: mol_type = other DNA
gaggtgcagctggtggagtctgggggaggcttggtgcagcctggggggtctctgagactctcctgtgcagcctctggattcactttggattattatgccataggctggttccgccaggccccagggaaggagcgtgagggtgtctcatgtattagtagtagtggtggtagcacaaactatgcagactccgtgaagggccgattcaccatctccagagacaacgccaagaacacggtgtatctgcaaatgaacagcctgaaacctgaggacacagccgtttattactgtgcagcctacgtttaccctgatgactactgttcagaatatgtcctgtcaaggtatgactactggggccaggggacccaggtcaccgtctcctca

SEQ ID NO: 4113 - DNA, 381 bp, synthetic construct
  source 1..381: mol_type = other DNA
gaggtgcagctggtggagtctgggggaggcttggtgcagcctggggggtctctgagactctcctgtgcagcctctggattcactttggattattatgccataggctggttccgccaggccccagggaaggagcgtgagggtgtctcatgtattagtacgagtggtgatagcacaaactatgcagactccgtgaagggccgattcaccatctccagagacaacgccaagaacacggtgtatctgcaaatgaacagcctgaaacctgaggacacagccgtttattactgtgcagcctacgtttaccctgattactactgttcagattatgtcctgttaaggcatgactactggggccaggggacccaggtcaccgtctcctca

SEQ ID NO: 4114 - DNA, 381 bp, synthetic construct
  source 1..381: mol_type = other DNA
gaggtgcagctggtggagtctgggggaggcttggtgcagcctggggggtctctgagactctcctgtgcagcctctggattcactttggattattatgccataggctggttccgccaggccccagggaaggagcgtgagggggtctcatgtattagtagtagtggtggtagcacaaactatgcagactccgtgaagggccgattcaccatctccagagacaacgccaagaacacggtgtatctgcaaatgaacagcctgaaacctgaggacacagccgtttattactgtgcagcctacgtttaccctgattactactgttcagactatgtcctgttaaggcatgactactggggccaggggacccaggtcaccgtctcctca

SEQ ID NO: 4115 - DNA, 381 bp, synthetic construct
  source 1..381: mol_type = other DNA
gaggtgcagctggtggagtctgggggaggcttggtgcagcctggggggtctctgagactctcctgtgcagcctctggattcactttggattattatgccataggctggttccgccaggccccagggaaggagcgtgagggggtctcatgtattagtagtagtggtggtagcacaaactatgcagactccgtgaagggccgattcaccatctccagagacaacgccaagaacacggtgtatctgcaaatgaacagcctgaaacctgaggacacagccgtttattactgtgcagccttcgtttaccctgattactactgttcagactatgtcctgttaaggtatgactactggggccaggggacccaggtcaccgtctcctca

SEQ ID NO: 4116 - DNA, 381 bp, synthetic construct
  source 1..381: mol_type = other DNA
gaggtgcagctggtggagtctgggggaggcttggtgcagcctggggggtctctgagactctcctgtgcagcctctggattcactttggattattatgccataggctggttccgccaggccccagggaaggagcgtgagggtgtctcatgtattagtagtagtggtggtagcacgaactatgcagactccgtgaagggccggttcaccatctccagagacaacgccaagaacacggtgtatctgcaaatgaacagcctgaaacctgaggacacagccgtttattactgtgcagcctacgtttaccctgatgactcctgttcagaatatgtcctgttaaggtatgactactggggccaggggacccaggtcaccgtctcctca

SEQ ID NO: 4117 - DNA, 381 bp, synthetic construct
  source 1..381: mol_type = other DNA
gaggtgcagctggtggagtctgggggaggcctggtgcagcctggggggtctctgagactctcctgtgcagcctctggattcactttggattattatgccataggctggttccgccaggccccagggaaggagcgtgagggggtctcatgcattagtagtagtggtgatagcacaaactatgcagactccgtgaagggccgattcaccatctccagagacaacgccaagaacacggtgtatctgcaaatgaacagcctgaaacctgaggacacagccgtttattactgtgcagcctacgtttaccctgattactactgttcagactatgtcctgttaaggcatgactactggggccaggggacccaggtcaccgtctcctca

SEQ ID NO: 4118 - DNA, 381 bp, synthetic construct
  source 1..381: mol_type = other DNA
gaggtgcagctggtggagtctgggggaggcttggtgcaacctggggggtctctgagactctcctgtgcagcctctggattcactttggattattatgccataggctggttccgccaggccccagggaaggagcgtgagggggtctcatgtattagtagtagtggtggtagcacgaactatgcagactccgtgaagggccgattcaccatctccagagacaacgccaagaacacggtgtatcttcaaatgaacagcctgaaacctgaggacacagccgtttattactgtgcagcctacgtttaccatgattactactgttcagactatgtcctgttaaggtatgactactggggccaggggacccaggtcaccgtctcctca

SEQ ID NO: 4119 - DNA, 381 bp, synthetic construct
  source 1..381: mol_type = other DNA
gaggtgcagctggtggagtctgggggaggcttggtgcagcctggggggtctctgagactctcctgtgcagcctctggattcactttggattattatgccataggctggttccgccaggccccagggaaggagcgtgagggggtctcatgtattagtagtagtggtggtagcacaaactatgcagactccgtgaagggccgattcaccatctccagagacaacgccaagaacacggtgtatctgcaaatgaacagcctgaaacctgaggacacagccgtttattactgtgcagcctacgttgaccctgattactactgttcagactatgtcctgttaaggtatgactactggggccaggggacccaggtcaccgtctcctca

SEQ ID NO: 4120 - DNA, 393 bp, synthetic construct
  source 1..393: mol_type = other DNA
gaggtgcagctggtggagtctgggggaggcttggtgcagcctggggggtctctgagactctcctgtgcagcctctggattcactttggattattatgccataggctggttccgccaggccccagggaaggagcgtgagggggtctcatgcattcgtactgagattagtagtactggtgataccacaaactatgcagactccgtgaagggccgattcaccatctccagagacaacgccaagaatacggtgtatctgcaaatgaacagcctgaaacctgaggacacagccgtttattactgtgcagcctacgtttaccctgattactactgttcagagtatgccctgtctaggtatgactactggggccaggggacccaggtcaccgtctcctca

SEQ ID NO: 4121 - DNA, 381 bp, synthetic construct
  source 1..381: mol_type = other DNA
gaggtgcagctggtggagtctgggggaggcttggtgcagcctggggggtctctgagactctcctgtgcagcctccggattcactttggattattatgccataggctggttccgccaggccccagggaaggagcgtgagggtgtctcatgtattagtagtagtggtggtaggacaaactatgcagactccgtgaagggccgattcaccatctccagagacaacgccaagaacacggtgtatttgcaaatgaaccgcctgaaacctgaggacacagccgtttattactgtgcagcctacatttaccctgattactactgttcagagtatgacctgttaaggtatgactactggggccaggggacccaggtcaccgtctcctca

SEQ ID NO: 4122 - DNA, 381 bp, synthetic construct
  source 1..381: mol_type = other DNA
gaggtgcagctggtggagtctgggggaggcttggtgcagcctggggggtctctgagactctcctgtgcagcctctggattcactttggattattatgccataggctggttccgccaggccccagggaaggagcgtgagggggtctcatgtattagtagtagtggtggtagcacaaactatgcagactccgtgaagggccgattcaccatctccagagacaacgccaagaacacggtgtatctgcaaatgaacagcctgaaacctgaggacacagccgtttattactgtgcagccgacgtttaccctgattactactgttcagactatgtcctgttaaggtatgactactggggccaggggacccaggtcaccgtctcctca

SEQ ID NO: 4123 - DNA, 381 bp, synthetic construct
  source 1..381: mol_type = other DNA
gaggtgcagctggtggagtctgggggaggcttggtgcagcctggggggtctctgagactctcctgtgcagcctctggattcactttggattattatgccataggctggttccgccaggccccagggaaggagcgtgagggtgtctcatgtattagtagtagtggtggtagcacaaactatgcagactccgtgaagggccgattcaccatctccagagacaacgccaagaacacggtgtatctgcaaatgaacagcctgaaacctgaggacacagccgtttattactgtgcatcctacgtttaccctgattattactgttcagaatatgtcctgttaaagtatgactactggggccaggggacccaggtcaccgtctcctca

SEQ ID NO: 4124 - DNA, 381 bp, synthetic construct
  source 1..381: mol_type = other DNA
gaggtgcagctggtggagtctgggggaggcttggtgcagcctggggggtctctgagactctcctgtgcagcctctggattcactttggattattatgccataggctggttccgccaggccccagggaaggagcgtgagggggtctcatgtattagtagtagtggtggtagcacaaactatgcagactccgtgaagggccgattcaccatctccagagacaacgccaagaacacggtgtatctgcaaatgaacagcctgaaacctgaggacacagccgtttattactgtgcagcctacgtttaccctgatgactactgttcagaatctgtcctgttaaggtatgactactggggccaggggacccaggtcaccgtctcctca

SEQ ID NO: 4125 - DNA, 381 bp, synthetic construct
  source 1..381: mol_type = other DNA
gaggtgcagctggtggagtctgggggaggcttggtgcagcctggggggtctctgagactctcctgtgcagcctctggattcactttggattattatgccataggctggttccgccaggccccagggaaggagcgtgagggggtctcatgtattagtagtagtggtggtagcacaaactatgcagactccgtgaagggccgattcaccatctccagagacaacgccaagaacacggtgtatctgcaaatgaacagcctgaaacctgaggacacagccgtttattactgtgcagcctacgtttaccctgatgactactgttcagactatgtcctgttaaggtatgactactggggccaggggacccaggtcaccgtctcctca

SEQ ID NO: 4126 - DNA, 381 bp, synthetic construct
  source 1..381: mol_type = other DNA
gaggtgcagctggtggagtctgggggaggcttggtgcagcctggggggtctctgagactctcctgtgcagcctctggattcactttggattattatgccataggctggttccgccaggccccagggaaggagcgtgagggggtctcatgtattagtagtagtggtggtagcacgaactatgcagactccgtgaagggccgattcaccatctccagagacaacgccaagaacacggtgtatctgcaaatgaacagcctgaaacctgaggacacagccgtttattactgtgcagcctacgattaccctgattactactgttcagactatgtcctgttaaggtatgactactggggccaggggacccaggtcaccgtctcctca

SEQ ID NO: 4127 - DNA, 381 bp, synthetic construct
  source 1..381: mol_type = other DNA
gaggtgcagctggtggagtctgggggaggcttggtgcagcctggggggtctctgagactctcctgtgcagcctctggattcactttggattattatgccataggctggttccgccaggccccagggaaggagcgtgagggggtcgcatgtattagtagtagtggtgatagtacaaactatgcagactccgtgaagggccgattcaccatctccagagacaacgccaagaacacggtgtatctgcaaatgaacagcctgaaacctgaggacacagccatttattactgtgcagcctacgtttaccctgattactactgtctagagtatgtcctgttaaagtatgactactggggccaggggacccaggtcaccgtctcctca

SEQ ID NO: 4128 - DNA, 381 bp, synthetic construct
  source 1..381: mol_type = other DNA
gaggtgcagctggtggagtctgggggaggcttggtgcagcctggggggtctctgagactctcctgtgcagcctctggattcactttggattattatgccataggctggttccgccaggccccagggaaggagcgtgagggtgtctcatgtattagtagtagtggtgatagcacaaactatgcagactccgtgaagggccgattcaccatctccagagacaacgccaagaacacggtgtatctgcaaatgaacagcctgaaacctgaggacacagccgtttattactgtgcagcctccgtttacccggattactactgttcagagtatgtcctgttaaagtatgactactggggccaggggacccaggtcaccgtctcctca

SEQ ID NO: 4129 - DNA, 381 bp, synthetic construct
  source 1..381: mol_type = other DNA
gaggtgcagctggtggagtctgggggaggcttggtgcagcctggggggtctctgagactctcctgtgcagcctctggattcactttggattattatgccataggctggttccgccaggccccagggaaggagcgtgagggtgtctcatgtattagtagtagtggtggtagcacaaactatgcagactccgtgaagggccgattcaccatctccagagacaacgccaagaacacggtgtatctgcaaatgaacagcctgaaacctgaggacacagccgtttattactgtgcagactacgtttaccctgattattactgttcagaatatgtcctgttaaagtatgactactggggccaggggacccaggtcaccgtctcctca

SEQ ID NO: 4130 - DNA, 393 bp, synthetic construct
  source 1..393: mol_type = other DNA
gaggtgcagctggtggagtctgggggaggcttggtgcagcctggggggtctctgagactctcctgtgcagcctctggattcactttggattattatgccataggctggttccgccaggccccagggaaggagcgtgagggggtctcatgcattcgtactgagattagtagtactggtgataccacaaactatgcagactccgtgaagggccgattcaccatctccagagacaacgccaagaatacggtgtatctgcagatgaacagcctgaaacctgaggacacagccgtttattactgtgcagcctacgtttaccctgatgactactgttcagagtatgtcctgtctaggtatgactactggggccaggggacccaggtcaccgtctcctca

SEQ ID NO: 4131 - DNA, 381 bp, synthetic construct
  source 1..381: mol_type = other DNA
gaggtgcagctggtggagtctgggggaggcttggtgcagcctggggggtctctgagactctcctgtgcagcctctggattcactttggattattatgccataggctggttccgccaggccccagggaaggagcgtgagggggtctcatgtattagtagtagtggtgatagcacaaactatgcagactccgtgaagggccgattcaccatctccagagacaacgccaagaacacggtgtatctgcaaatgaacagcctgaaacctgaggacacagccgtttattactgtgcagcctacgtttaccctgattactactgttcagactatgacctgttaaggtatgactactggggccaggggacccaggtcaccgtctcctca

SEQ ID NO: 4132 - DNA, 381 bp, synthetic construct
  source 1..381: mol_type = other DNA
gaggtgcagctggtggagtctgggggaggcttggtgcagcctggggggtctctgagactctcctgtgcagcctctggattcactttggattattatgccataggctggttccgccaggccccagggaaggagcgtgagggggtctcatgcattagtagtagtggtgatagcacaaactatgcagactccgtgaagggccgattcaccatctccagagacaacgccaagaacacggtttatctgcaaatgaacagcctgaaacctgaggacacagccgtttattactgtgcagcctacgtttaccctgattactactgttcagactatgtcccgttaaggtatgactactggggccaggggacccaggtcaccgtctcctca

SEQ ID NO: 4133 - DNA, 381 bp, synthetic construct
  source 1..381: mol_type = other DNA
gaggtgcagctggtggagtctgggggaggcttggtgcagcctggggggtctctgagactctcctgtgcagcctctggattcactttggattattatgccataggctggttccgccaggccccagggaaggagcgtgagggtgtctcatgtattagtagtagtggtggtagcacaaactatgcagactccgtgaagggccgattcaccatctccagagacaacgccaagaacacggtgtatctgcaaatgaacagcctgaaatttgaggacacagccgtttattactgtgcagcctacgtttaccctgattactactgttcagagtatgtcctgtcaaggtatgacaactggggccaggggacccaggtcaccgtctcctca

SEQ ID NO: 4134 - DNA, 381 bp, synthetic construct
  source 1..381: mol_type = other DNA
gaggtgcagctggtggagtctgggggaggcttggtgcagcctggggggtctctgagactctcctgtgcagcctctggattcactttggattattatgccataggctggttccgccaggccccagggaaggagcgtgagggggtctcatgtattagtagtagtggtggtagcacaaactatgcagactccgtgaagggccgattcaccatctccagagacaacgccaagaacacggtgtatctgcaaatgaacggcctgaaacctgaggacacagccgtttattactgtgcagcctacgtttaccctgattactactgttcagactatgtcctgataaggtatgactactggggccaggggacccaggtcaccgtctcctca

SEQ ID NO: 4135 - DNA, 381 bp, synthetic construct
  source 1..381: mol_type = other DNA
gaggtgcagctggtggagtctgggggaggcttggtgcagcctggggggtctctgagactctcctgtgcagcctctggattcactttggattattatgccataggctggttccgccaggccccagggaaggagcgtgagggggtctcatgtattagtagtagtggtggtagcacaaactatgcagactccgtgaagggccgattcaccatctccagagacaacgccaagaacacggtgtatctgcaaatgaacagcctgaaacctgaggacacagccgtttattactgtgcagactacgtttaccctgattactactgttcagactatgtcctgttaaggtatgactactggggccaggggacccaggtcaccgtctcctca

SEQ ID NO: 4136 - DNA, 381 bp, synthetic construct
  source 1..381: mol_type = other DNA
gaggtgcagctggtggagtctgggggaggcttggtgcagcctggggggtctctgagactctcctgtgcagcctctggattcactttggattattatgccataggctggttccgccaggccccagggaaggagcgtgagggtgtctcatgtattagtagtagtggtggtagcacaaactatgcagactccgtgaagggccgattcaccatctccagagacaacgccaagaacacggtgtatctgcaaatgaacagcctgaaacctgaggacacagccgtttattactgtgcagcctacgtttaccctgattactcctgttcagaatatgtcccgttaaggtatgactactggggccaggggacccaggtcaccgtctcctca

SEQ ID NO: 4137 - DNA, 381 bp, synthetic construct
  source 1..381: mol_type = other DNA
gaggtgcagctggtggagtctgggggaggcttggtgcagcctggggggtctctgagactctcctgtgcagcctctggattcactttggattattatgccataggctggttccgccaggccccagggaaggagcgtgagggtgtctcatgtattagtagtagtggtggtagcacaaactatgcagactccgtgaagggccgattcaccatctccagagacaacgccaagaacacggtgtatctgcaaatgaacagcctgaaacctgaggacacagccgtttattactgtgcagcctacgtttaccctgattactactgttcagactatgtcctgttaaggtatgtctactggggccaggggacccaggtcaccgtctcctca

SEQ ID NO: 4138 - DNA, 381 bp, synthetic construct
  source 1..381: mol_type = other DNA
gaggtgcagctggtggagtctgggggaggcttggtgcagcctggggggtctctgagactctcctgtgcagcctctggattcatcatggattattatgccataggctggttccgccaggccccagggaaggagcgtgagggtgtctcctgtattagtagtagtggtgatagcacaaactatgcagactccgtgaagggccgattcaccatctccagagacaacgccaagaacacggtgtatctgcaaatgaacagcctgaaacctgaggacacagccgtttattactgtgcagcctacgtttaccctgattactactgttcagaatatgttctgttaaagtatggctactggggccaggggacccaggtcaccgtctcctca

SEQ ID NO: 4139 - DNA, 381 bp, synthetic construct
  source 1..381: mol_type = other DNA
gaggtgcagctggtggagtctgggggaggcttggtgcagcctggggggtctctgagactctcctgtgcggcctctggattcactttggattattatgccataggctggttccgccaggccccagggaaggagcgtgagggtgtctcatgtattagtagtagtggtggtagcacaaactatgcagactccgtgaagggccgattcaccatctccagagacaacgccaagaacacggtgtatctgcaaatgaacagcctgaaacctgaggacacagccgtttattactgtgcagcctacgtttaccctgattactactgtacagactatgtcctgttaaggtatgactactggggccaggggacccaggtcaccgtctcctca

SEQ ID NO: 4140 - DNA, 381 bp, synthetic construct
  source 1..381: mol_type = other DNA
gaggtgcagctggtggagtctgggggaggcttggtgcagcctggggggtctctgagactctcctgtgcagcctctggattcactttggattattatgccataggctggttccgccaggccccagggaaggagcgtgagggggtctcatgtattagtagtagtggtggtagcacaaactatgcagactccgtgaagggccgattcaccatctccagagacaacgccaagaacacggtgtatctacaaatgaacagcctgaaacctgaggacacagccgtttattactgtgcagcctacgtttaccctgattactactgtccagactatgtcctgttaaggtatgactactggggccaggggacccaggtcaccgtctcctca

SEQ ID NO: 4141 - DNA, 381 bp, synthetic construct
  source 1..381: mol_type = other DNA
gaggtgcagctggtggagtctgggggaggcttggtgcagcctggggggtctctgagactctcctgtgcagcctctggattcactttggattattatgccataggctggttccgccaggccccagggaaggagcgtgagggtgtctcatgtattagtagtagtggtgatagcacaaactatgcagactccgtgaagggccgattcaccatctccagagacaacgccaagaacacggtgtatctgcaaatgaacagcctgaaacctgaggacacagccgtttattactgtgcagcctacgtttaccctgattactactgtccagaatatgtcctgttaaagtatgactactggggccaggggacccaggtcaccgtctcctca

SEQ ID NO: 4142 - DNA, 381 bp, synthetic construct
  source 1..381: mol_type = other DNA
gaggtgcagctggtggagtctgggggaggcttggtgcagcctggggggtctctgagactctcctgtgcagcctctggattcactttggattattatgccataggctggttccgccaggccccagggaaggagcgtgagggtgtctcatgtattagtagtagtggtggtagcacaaactatgcagactccgtgaagggccgattcaccatctccagagacaacgccaagaacacggtgtatctgcaaatgaacagcctgaaacctgaggacacagccgtttattactgtgcagcctacgtttaccctgattactactgttcagactatgtcctgttaaggtatgcctactggggccaggggacccaggtcaccgtctcctca

SEQ ID NO: 4143 - DNA, 381 bp, synthetic construct
  source 1..381: mol_type = other DNA
gaggtgcagctggtggagtctgggggaggcttggtgcagcctggggggtctctgagactctcctgtgcagcctctggattcactttggattattatgccataggctggttccgccaggccccagggaaggagcgtgagggtgtctcatgtattagtacgagtggtgatagcacaaactatgcagactccgtgaagggccgattcaccatctccagagacaacgccaagaacacggtgtatctgcaaatgaacagcctgaaacctgaggacacagccgtttattactgtgcagcctacgcttaccctgattactactgttcagattatgtcctgttaaggtatgactactggggccaggggacccaggtcaccgtctcctca

SEQ ID NO: 4144 - DNA, 381 bp, synthetic construct
  source 1..381: mol_type = other DNA
gaggtgcagctggtggagtctgggggaggcttggtgcagcctggggggtctctgagactctcctgtgcagcctctggattcactttggattattatgccataggctggttccgccaggccccagggaaggagcgtgagggtgtctcatgtattagtacgagtggtgatagcacaaactatgcagactccgtgaagggccgactcaccatctccagagacaacgccaagaacacggtgtatctgcaaatgaacagcctgaaacctgaggacacagccgtttattactgtgcagcctacgtttaccctgattacttctgttcagattatgtcctgttaaggtatgactactggggccaggggacccaggtcaccgtctcctca

SEQ ID NO: 4145 - DNA, 381 bp, synthetic construct
  source 1..381: mol_type = other DNA
gaggtgcagctggtggagtctgggggaggcttggtgcagcctggggggtctctgagactctcctgtgcagcctctggattcactttggattattatgccataggctggttccgccaggccccagggaaggagcgtgagggtgtctcatgtattagtagtagtggtggtagcacaaactatgcagactccgtgaagggccgattcaccatctccagagacaacgccaagaacacggtgtatctgcaaatgaacagcctgaaacctgaggacacagccgtttattactgtgcagcctacgtttaccctgattattactgttcagaatatgtcctgttaaagcatgactactggggccaggggacccaggtcaccgtctcctca

SEQ ID NO: 4146 - DNA, 381 bp, synthetic construct
  source 1..381: mol_type = other DNA
gaggtgcagctggtggagtctgggggaggcttggtgcagcctggggggtctctgagactctcctgtgcagcctctgaattcactttggattattatgccataggctggttccgccaggccccagggaaggagcgtgagggtgtctcatgtattagtagtagtggtggtagcacaaactatgcagactccgtgaagggccgattcaccatctccagagacaacgccaagaacacggtgtatctgcaaatgaacagcctgaaacctgaggacacagccgtttattactgtgcagcctacgtttaccctgatcactactgttcagactatgtcctgttaaggtatgactactggggccaggggacccaggtcaccgtctcctca

SEQ ID NO: 4147 - DNA, 381 bp, synthetic construct
  source 1..381: mol_type = other DNA
gaggtgcagctggtggagtctgggggaggcttggtgcaacctggggggtctctgagactctcctgtgcagcctctggattcactttggattattatgccataggctggttccgccaggccccagggaaggagcgtgagggggtctcatgtattagtagtagtggtggtagcacgaactatgcagactccgtgaagggccgattcaccatctccagagacaacgccaagaacacggtgtatctgcaaatgaacagcctgaaacctgaggacacagccgtttattactgtgcagcctacgtttaccctgattactactgttcaggctatgtcccgtcaaggtatgactactggggccaggggacccaggtcaccgtctcctca

SEQ ID NO: 4148 - DNA, 381 bp, synthetic construct
  source 1..381: mol_type = other DNA
gaggtgcagctggtggagtctgggggaggcttggtgcagcctggggggtctctgagactctcctgtgcagcctctggattcactttggattattatgccataggctggttccgccaggccccagggaaggagcgtgagggtgtctcatgtattagtagtagtggtggtagcacaaactatgcagactccgtgaagggccgattcaccatctccagagacaacgccaagaacacggtgtatctgcaaatgaacagcctgaaacctgaggacacagccgtttattactgtgcagcctacgtttaccctgattactactgttcagaatatgtcctgtcaaggcatgactactggggccaggggacccaggtcaccgtctcctca

SEQ ID NO: 4149 - DNA, 381 bp, synthetic construct
  source 1..381: mol_type = other DNA
gaggtgcagctggtggagtctgggggaggcttggtgcagcctggggggtctctgagactctcctgtgcagcctctggattcactttggattattatgccataggctggttccgccaggccccagggaaggagcgtgagggggtctcatgtattagtagtagtggtggtagcacaaactatgcagactccgtgaagggccgattcaccatctccagagacaacgccaagaacacggtgtatctgcaaatgaacagcctgaaacctgaggacacagccgtttattactgtgcagcctacgtgtaccctgatcactactgttcagactatgtcctgttaaggtatgactactggggccaggggacccaggtcaccgtctcctca

SEQ ID NO: 4150 - DNA, 381 bp, synthetic construct
  source 1..381: mol_type = other DNA
gaggtgcagctggtggagtctgggggaggcttggtgcagcctggggggtctctgagactctcctgtgcagcctctggattcactttggattattatgccataggctggttccgccaggccccagggaaggagcgtgagggtgtctcatgtattagtagtagtggtggtagcacaaactatgcagactccgtgaagggccgattcaccatctccagagacaacgccaagaacacggtgtatctgcaaatgaacagcctgaaacctgaggacacagccgtttattactgtgcagcctacgtttaccctgagtactactgttcagaatatgccctgttaaggtatgactactggggccaggggacccaggtcaccgtctcctca

SEQ ID NO: 4151 - DNA, 381 bp, synthetic construct
  source 1..381: mol_type = other DNA
gaggtgcagctggtggagtctgggggaggcttggtgcagcctggggggtctctgagactctcctgtgcagcctctggattcactttggattattatgccataggctggttccgccaggccccagggaaggagcgtgagggtgtctcatgtattagtagtagtggtggtagcacaaactatgcagactccgtgaagggccgattcaccatctccagagacaacgccaagaacacggtgtatctgcaaatgaacagcctgaaacctgaggacacagccgtttattactgtgcagcctacgtttaccctgattactactgttcagactatgtcctgttaaggtatggctactggggccaggggacccaggtcaccgtctcctca

SEQ ID NO: 4152 - DNA, 393 bp, synthetic construct
  source 1..393: mol_type = other DNA
gaggtgcagctggtggagtctgggggaggcttggtgcagcctggggggtctctgagactctcctgtgcagcctctggattcactttggattattatgccataggctggttccgccaggccccagggaaggagcgtgagggggtctcatgcattcgtactgagattagtagtactggtgataccacaaactatgcagactccgtgaagggccgattcaccatctccagagacaacgccaagaatacggtgtatctgcaaatgaacagcctgaaacctgaggacacagccgtttattactgtgcagcctacgcttaccctgattactactgttcagagtatgtcctgtctaggtatgactactggggccaggggacccaggtcaccgtctcctca

SEQ ID NO: 4153 - DNA, 381 bp, synthetic construct
  source 1..381: mol_type = other DNA
gaggtgcagctggtggagtctgggggaggcttggtgcagcctggggggtctctgagactctcctgtgcagcctctggattcactttggattattatgccataggctggttccgccaggccccagggaaggagcgtgagggggtctcatgcattagtagtagtggtgatagcacaaactatgcagactccgtgaagggccgattcaccatctccagagacaacgccaagaacacggtgtatctgcaaatgaacagcctgaaacctgaggacacagccgtttattactgtgcagcctacgtttaccctgagtactactgttcagactatgtcctgttaaggtatgactactggggccaggggacccaggtcaccgtctcctca

SEQ ID NO: 4154 - DNA, 381 bp, synthetic construct
  source 1..381: mol_type = other DNA
gaggtgcagctggtggagtctgggggaggcttggtgcagcctggggggtctctgagactctcctgtgcagcctctggattcactttggattattatgccataggctggttccgccaggccccagggaaggagcgtgagggggtctcatgtattagtagtagtggtggtagcacaaactatgcagactccgtgaagggccgattcaccatctccagagacaacgccaagaacacggtgtatctgcaaatgaacagcctgaaacctgaggacacagccgtttattactgtgcagcctacgtttaccctgattactcctgttcagactatgtcctgttaaggtatgactactggggccaggggacccaggtcaccgtctcctca

SEQ ID NO: 4155 - DNA, 381 bp, synthetic construct
  source 1..381: mol_type = other DNA
gaggtgcagctggtggagtctgggggaggcttggtgcagcctggggggtctctgagactctcctgtgcagcctctggattcactttggattattatgccataggctggttccgccaggccccagggaaggagcgtgagggtgtctcatgtattagtacgagtggtgatagcacaaactatgcagactccgtgaagggccgattcaccatctccagagacaacgccaagaacacggtgtatctgcaaatgaacagcctgaaacctgaggacacagccgtttattactgtgcagcctacgttgaccctgattactactgttcagattatgtcctgttaaggtatgactactggggccaggggacccaggtcaccgtctcctca

SEQ ID NO: 4156 - DNA, 381 bp, synthetic construct
  source 1..381: mol_type = other DNA
gaggtgcagctggtggagtctgggggaggcttggtgcagcctggggggtctctgagactctcctgtgcagcctctggattcactttggattattatgccataggctggttccgccaggccccagggaaggagcgtgagggtgtctcatgtattagtagtagtggtggtagcacaaactatgcagactccgtgaagggccgattcaccatctccagagacaacgccaagaacacggtgtatctgcaaatgaacagcctgaaacctgaggacacagccgtttattactgtgcagcctacttttaccctgattattactgttcagaatatgtcctgttaaagtatgactactggggccaggggacccaggtcaccgtctcctca

SEQ ID NO: 4157 - DNA, 381 bp, synthetic construct
  source 1..381: mol_type = other DNA
gaggtgcagctggtggagtctgggggaggcttggtgcagcctggggggtctctgagactctcctgtgcagcctctggattcactttggattattatgccataggctggttccgccaggccccagggaaggagcgtgagggggtctcatgcattagtagtagtggtgatagcacaaactatgcagactccgtgaagggccgattcaccatctccagagacaacgccaagaacacggtgtatctgcaaatgaacagcctgaaacctgaggacacagccgtttattactgtgcagcctacgtttaccctgattactactgttcagactctgtcctgttaaggtatgactactggggccaggggacccaggtcaccgtctcctca

SEQ ID NO: 4158 - DNA, 381 bp, synthetic construct
  source 1..381: mol_type = other DNA
gaggtgcagctggtggagtctgggggaggcttggtgcagcctggggggtctctgagactctcctgtgcagcctctggattcactttggattattatgccataggctggttccgccaggccccagggaaggagcgtgagggtgtctcatgtattagtagtagtggtggtagcacaaactatgcagactccgtgaagggccgattcaccatctccagagacaacgccaagaacacggtgtatctgcaaatgaacagcctgaaacctgaggacacagccgtttattactgtggagcctacgtttaccctgattactactgttcagactatgtcctgttaaggtatgactactggggccaggggacccaggtcaccgtctcctca

SEQ ID NO: 4159 - DNA, 381 bp, synthetic construct
  source 1..381: mol_type = other DNA
gaggtgcagctggtggagtctgggggaggcttggtgcagcctggggggtctctgagactctcctgtgcagcctctggattcacattggattattatgccataggctggttccgccaggccccagggaaggagcgtgagggggtctcatgtattagtagtagtggtggtagcacaaactatgcagactccgtgaagggccgattcaccatctccagagacaacgccaagaacacggtgtatctgcaaatgaacagcctgaaacctgaggacacagccgtttattactgtgaagcctacgtttaccctgattactactgttcagactatgtcctgttaaggtatgactactggggccaggggacccaggtcaccgtctcctca

SEQ ID NO: 4160 - DNA, 381 bp, synthetic construct
  source 1..381: mol_type = other DNA
gaggtgcagctggtggagtctgggggaggcttggtgcagcctggggggtctctgagactctcctgtgcagcctctggattcactttggattattatgccataggctggttccgccaggccccagggaaggagcgtgagggtgtctcatgtattagtagtagtggtggtagcacaaactatgcagactccgtgaagggccgattcaccatctccagagacaacgccaagaacacggtgtatctgcaaatgaacagcctgaaacctgaggacacagccgtttattactgtgcagcctacgtttaccctgataactactgttcagagtatgtcctgttaaggcatgactactggggccagggggcccaggtcaccgtctcctca

SEQ ID NO: 4161 - DNA, 381 bp, synthetic construct
  source 1..381: mol_type = other DNA
gaggtgcagctggtggagtctgggggaggcttggtgcagcctggggggtctctgagactctcctgtgcagcctctggattcactttggattattatgccataggctggttccgccaggccccagggaaggagcgtgagggtgtctcatgtattagtagtagtggtggtagcacaaactatgcagactccgtgaagggccgattcaccatctccagagacaacgccaagaacacggtgtatctgcaaatgaacagcctgaaacctgaggacacagccgtttattactgtgcagcctacgtttaccctgattactactgttcagactttgtcctgttaaggtatgactactggggccaggggacccaggtcaccgtctcctca

SEQ ID NO: 4162 - DNA, 381 bp, synthetic construct
  source 1..381: mol_type = other DNA
gaggtgcagctggtggagtctgggggaggcttggtgcagcctggggggtctctgagactctcctgtgcagcctctggattcactttggattattatgccataggctggttccgccaggccccagggaaggagcgtgagggtgtctcatgtattagtagtagtggtggtagcacaaactatgcagactccgtgaagggccgattcaccatctccagagacaacgccaagaacacggtgtatctgcaaatgaacagcctgaagcctgaggacacagccgtttattactgtgcagcctacgtttaccctgattattactgttcagaatatgtcctgttaaagtatgtctactggggccaggggacccaggtcaccgtctcctca

SEQ ID NO: 4163 - DNA, 381 bp, synthetic construct
  source 1..381: mol_type = other DNA
gaggtgcagctggtggagtctgggggaggcttggtgcagcctggggggtctctgagactctcctgtgcagcctctggattcactttggattattatgccataggctggttccgccaggccccagggaaggagcgtgagggggtctcatgtattagtagtagtggtggtagcactaactatgcagactccgtgaagggccgattcaccatctccagagacaacgccaagaacacggtgtatctgcaaatgaacagcctgaaacctgaggacacagccgtttattactgtgcagcctacttttaccctgattactactgttcagactatgtcctgttaaggtatgactactggggccaggggacccaggtcaccgtctcctca

SEQ ID NO: 4164 - DNA, 381 bp, synthetic construct
  source 1..381: mol_type = other DNA
gaggtgcagctggtggagtctgggggaggcttggtgcagcctggggggtctctgagactctcctgtgcagcctctggattcactttggattattatgccataggctggttccgccaggccccagggaaggagcgtgagggggtctcatgtattagtagtagtggtggtagcacaaactatgcagactccgtgaagggccgattcaccatctccagagacaatgccaagaacacggtgtatctgcaaatgaacagcctgaaacctgaggacacagccgtttattactgttcagcctacgtttaccctgattactactgttcagactatgtcctgttaaggtatgactactggggccaggggacccaggtcaccgtctcctca

SEQ ID NO: 4165 - DNA, 381 bp, synthetic construct
  source 1..381: mol_type = other DNA
gaggtgcagctggtggagtctgggggaggcttggtgcagcctggggggtctctgagactctcctgtgcagcctctggattcactttggattattatgccataggctggttccgccaggccccagggaaggagcgtgagggtgtctcatgtattagtagtagtggtggtagcacaaactatgcagactccgtgaagggccgattcaccatctccagagacaacgccaagaacacggtgtatctgcaaatgaacagcctgaaacctgaggacacagccgtttattactgtgcagcctacgtttaccctgattactactgttcagactctgtcctgttaaggtatgactactggggccaggggacccaggtcaccgtctcctca

SEQ ID NO: 4166 - DNA, 381 bp, synthetic construct
  source 1..381: mol_type = other DNA
gaggtgcagctggtggagtctgggggaggcttggtgcagcctggggggtctctgagactctcctgtgcagcctctggattcactttggattattatgccataggctggttccgccaggccccagggaaggagcgtgagggggtctcatgcatcagtagtagtggtgatagcacaaactatgcagactccgtgaagggccgattcaccatctccagagacaacgccaagaacacggtgtatctgcaaatgaacagcctgaaacctgaggacacagccgtttattactgtgcagcctacgtttaccctgattattactgtacagactatgtcctgttaaggtatgactactggggccaggggacccaggtcaccgtctcctca

SEQ ID NO: 4167 - DNA, 381 bp, synthetic construct
  source 1..381: mol_type = other DNA
gaggtgcagctggtggagtctgggggaggcttggtgcagcctggggggtctctgagactctcctgtgcagcctctggattcactttggattattatgccataggctggttccgccaggccccagggaaggagcgtgagggtgtctcatgtattagtagtagtggtggtagcacaaactatgcagactccgtgaagggccgattcaccatctccagagacaacgccaagaacacggtgtatctgcaaatgaacagcctgaaacctgaggacacagccgtttattactgtgcagcctacgtttaccctgattactactgttcagagtatgtcccgttaaggtatgacaactggggccaggggacccaggtcaccgtctcctca

SEQ ID NO: 4168 - DNA, 381 bp, synthetic construct
  source 1..381: mol_type = other DNA
gaggtgcagctggtggagtctgggggaggcttggtgcagcctggggggtctctgagactctcctgtgcagcctctggattcactttggattattatgccataggctggttccgccaggtcccagggaaggagcgtgagggtgtctcatgtattagtagtagtggtggtagcacaaactatgcagactccgtgaagggccgattcaccatctccagagacaacgccaagaacacggtgtatctgcaaatgaacagcctgaaacctgaggacacagccgtttattactgtgcagcctacgtttaccctgattattactgtccagaatatgtcctgttaaagtatgactactggggccaggggacccaggtcaccgtctcctca

SEQ ID NO: 4169 - DNA, 381 bp, synthetic construct
  source 1..381: mol_type = other DNA
gaggtgcagctggtggagtctgggggaggcttggtgcagcctggggggtctctgagactctcctgtgcagcctctggattcactttggattattatgccataggctggttccgccaggccccagggaaggagcgtgagggtgtctcatgtattagtagtagtggtggtagcacaaactatgcagactccgtgaagggccgattcaccatctccagagacaacgccaagaacacggtgtatctgcaaatgaacagcctgaaacctgaggacacagccgtttattactgtgcagcctacgtttaccctgattatgactgttcagactatgtcctgttaaggtatgactactggggccaggggacccaggtcaccgtctcctca

SEQ ID NO: 4170 - DNA, 381 bp, synthetic construct
  source 1..381: mol_type = other DNA
gaggtgcagctggtggagtctgggggaggcttggtgcagcctggggggtctctgagactctcctgtgcagcctctggattcactttggattattatgccataggctggttccgccaggccccagggaaggagcgtgagggggtctcatgtattagtagtagtggtggtagcacaaactatgcagactccgtgaagggccgattcaccatctccagagacaacgccaagaacacggtgtatctgcaaatgaacagcctgaaacctgaggacacagccgtttattactgtgcagcctacgtttcccctgattactactgttccgactatgtcctgttacggtatgactactggggccaggggacccaggtcaccgtctcctca

SEQ ID NO: 4171 - DNA, 381 bp, synthetic construct
  source 1..381: mol_type = other DNA
gaggtgcagctggtggagtctgggggaggcttggtgcagcctggggggtctctgagactctcctgtgcagcctctggattcactttggattattatgccataggctggttccgccaggccccagggaaggagcgtgagggtgtctcatgtattagtacgagtggtgatagcacaaactatgcagactccgtgaagggccgattcaccatctccagagacaacgccaagaacacggtgtatctgcaaatgaacagcctgaaacctgaggacacagccgtttattactgtgcagcctacgtttaccctgagtactactgttcagattatgtcctgttaaggtatgactactggggccaggggacccaggtcaccgtctcctca

SEQ ID NO: 4172 - DNA, 381 bp, synthetic construct
  source 1..381: mol_type = other DNA
gaggtgcagctggtggagtctgggggaggcttggtgcagcctggggggtctctgagactctcctgtgcagcctctggattcactttggattattatgccataggctggttccgccaggccccagggaaggagcgtgagggtgtctcatgtattagtagtagtggtggtagcacaaactatgcagactccgtgaagggccgattcaccatctccagagacaacgccaagaacacggtgtatctgcaaatgaacagcctgaaacctgaggacacagccgtttattactgtgcagcctccgtttaccctgattactactgttcagaatatgtcccgttaaggtatgactactggggccaggggacccaggtcaccgtctcctca

SEQ ID NO: 4173 - DNA, 381 bp, synthetic construct
  source 1..381: mol_type = other DNA
gaggtgcagctggtggagtctgggggaggcttggtgcagcctggggggtctctgagactctcctgtgcagcctctggattcatcatggattattatgccataggctggttccgccaggtcccagggatggagcgtgagggtgtctcctgtattagtagtagtggtgatagcacaaactatgcagactccgtgaagggccgattcaccgtctccagagacaacgccaagaacacggtgtatctgcaaatgaacagcctgaaacctgaggacacagccgtttattactgtgcagcctacgtttaccctgatcactactgttcagaatatgttctgttaaagtatgactactggggccaggggacccaggtcaccgtctcctca

SEQ ID NO: 4174 - DNA, 381 bp, synthetic construct
  source 1..381: mol_type = other DNA
gaggtgcagctggtggagtctgggggaggcttggtgcagcctggggggtctctgagactctcctgtgcagcctctggattcactttggattattatgccataggctggttccgccaggccccagggaaggagcgtgagggtgtctcatgtattagtagtagtggtggtagcacaaactatgcagactccgtgaagggccgattcaccatctccagagacaacgccaagaacacggtgtatctgcaaatgaacagcctgaaacctgaggacacagccgtttattactgtgcagccttcgtttaccctgattattactgttcagaatatgtcctgttaaagtatgactactggggccaggggacccaggtcaccgtctcctca

SEQ ID NO: 4175 - DNA, 381 bp, synthetic construct
  source 1..381: mol_type = other DNA
gaggtgcagctggtggagtctgggggaggcttggtgcagcctggggggtctctgagactctcctgtgcagcctctggattcactttggattattacgccataggctggttccgccaggccccagggaaggagcgtgagggggtctcatgtattagtagagatggtggtagcacaaattatggagactccgtgaagggccgattcaccatctccagagacaatgccaagaacacggtgtatctgcaaatgaacagcctggaacctgaggacacagccgtttattactgtgcagcctacgtttaccctgattactactgttcagagtatgtcctgttaaagtatgaccactggggccaggggacccaggtcaccgtctcctca

SEQ ID NO: 4176 - DNA, 381 bp, synthetic construct
  source 1..381: mol_type = other DNA
gaggtgcagctggtggagtctgggggaggcttggtgcagcctggggggtctctgagactctcctgtgcagcctctggattcactttggattattatgccataggctggttccgccaggccccagggaaggagcgtgagggcgtctcatgtattagtagtagtggtgatagcacaaactatgcagactccgtgaagggccgattcaccatctccagagacaacgccaagaatacggtgtatctgcaaatgaacagcctgaaacctgaggacacagccgtttattactgtgcagcctacgtttcccctgattactactgttcagaatatgtcctgttaaaatatgactactggggccaggggacccaggtcaccgtctcctca

SEQ ID NO: 4177 - DNA, 381 bp, synthetic construct
  source 1..381: mol_type = other DNA
gaggtgcagctggtggagtctgggggaggcttggtgcagcctggggggtctctgagactctcctgtgcagcctctggattcactttggattattatgccataggctggttccgccaggccccagggaaggagcgtgagggtgtctcatgtattagtagtagtggtggtagcacaaactatgcagactccgtgaagggccgattcaccatctccagagacaacgccaagaacacggtgtatctgcaaatgaacagcctgaaacctgaggacacagccgtttattactgtgcagcctacgtttaccctgattactcctgttcagagtatgtcctgttaaagtatgactactggggccaggggacccaggtcaccgtctcctca

SEQ ID NO: 4178 - DNA, 393 bp, synthetic construct
  source 1..393: mol_type = other DNA
gaggtgcagctggtggagtctgggggaggcttggtgcagcctggggggtctctgagactctcctgtgcagcctctggattcactttggattattatgccataggctggttccgccaggccccagggaaggagcgtgagggggtctcatgcattcgtactgagattagtagtactggtgataccacaaactatgcagactccgtgaagggccgattcaccatctccagagacaacgccaagaatacggtgtatctgcaaatgaacagcctgaaacctgaggacacagccgtttattactgtgcagcctacgtttaccctgattactcctgttcagagtatgtcctgtctaggtatgactactggggccaggggacccaggtcaccgtctcctca

SEQ ID NO: 4179 - DNA, 381 bp, synthetic construct
  source 1..381: mol_type = other DNA
gaggtgcagctggtggagtctgggggaggcttggtgcagcctggggggtctctgagactctcctgtgcagcctctggattcactttggattattatgccataggctggttccgccaggccccagggaaggagcgtgagggggtctcatgtattagtagtagtggtggtagcacgaactatgcagactccgtgaagggccgattcaccatctctagagacaacgccaagaacacggtgtatctgcaaatgaacagcctgaaacctgaggacacagccgtttattactgtgcagcctacgtttactctgattactactgttcagactatgtcctgttaaggtatgactactggggccaggggacccaggtcaccgtctcctca

SEQ ID NO: 4180 - DNA, 381 bp, synthetic construct
  source 1..381: mol_type = other DNA
gaggtgcagctggtggagtctgggggaggcttggtgcagcctggggggtctctgagactctcctgtgcagcctctggattcatcatggattattatgccataggctggttccgccaggccccagggaaggagcgtgagggtgtctcctgtattagtagtagtggtgatagcacaaactatgcagactccgtgaagggccgattcaccatctccagagacaacgccaagaacacggtgtatctgcaaatgaacagcctgaaacctgaggacacagccgtttattactgtgcagcctacgttgaccctgattactactgttcagaatatgttctgttaaagtatgactactggggccaggggacccaggtcaccgtctcctca

SEQ ID NO: 4181 - DNA, 381 bp, synthetic construct
  source 1..381: mol_type = other DNA
gaggtgcagctggtggagtctgggggaggcttggtgcagcctggggggtctctgagactctcctgtgcagcctctggattcatcatggattattatgccataggctggttccgccaggccccagggaaggagcgtgagggtgtctcctgtattagtagtagtggtgatagcacaaactatgcagactccgtgaagggccgattcaccatctccagagacaacgccaagaacacggtgtatctgcaaatgaacagcctgaaacctgaggacacagccgtttattactgtgcagcctacgtttaccctgattactactgttcagaatatggtctgttaaagtatgactactggggccaggggacccaggtcaccgtctcctca

SEQ ID NO: 4182 - DNA, 381 bp, synthetic construct
  source 1..381: mol_type = other DNA
gaggtgcagctggtggagtctgggggaggcttggtgcagcctggggggtctctgagactctcctgtgcagcctctggattcactttggattattatgccataggctggttccgccaggccccagggaaggagcgtgagggtgtctcatgtattagtagtagtggtggtagcacaaactatgctgactccgtgaagggccgattcaccatctccagagacaacgccaagaacacggtgtatctgcaaatgaacagcctgaaacctgaggacacagccatttattactgtgcagcctacgtttaccctgattactactgttcagagtatgtcctgtcaaagtatgactactggggccaggggacccaggtcaccgtctcctca

SEQ ID NO: 4183 - DNA, 393 bp, synthetic construct
  source 1..393: mol_type = other DNA
gaggtgcagctggtggagtctgggggaggcttggtgcagcctggggggtctctgagactctcctgtgcagcctctggattcactttggattattatgccataggctggttccgccaggccccagggaaggagcgtgagggggtctcatgcattcgtactgagattagtagtactggtgataccacaaactatgcagactccgtgaagggccgattcaccatctccagagacaacgccaagaatacggtgtatctgcaaatgaacagcctgaaacctgaggacacagccgtttattactgtgcagcctacgttgaccctgattactactgttcagagtatgtcctgtctaggtatgactactggggccaggggacccaggtcaccgtctcctca

SEQ ID NO: 4184 - DNA, 381 bp, synthetic construct
  source 1..381: mol_type = other DNA
gaggtgcagctggtggagtctgggggaggcttggtgcagcctggggggtctctgagactctcctgtgcagcctctggattcactttggattattatgccataggctggttccgccaggccccagggaaggagcgtgagggggtctcatgtattagtagtagtggtggtagcacaaactatgcagactccgtgaagggccgattcaccatctccagagacaacgccaaggacacggtgtatctgcaaatgaacagcctgaaacctgaggacacagccgtttattactgtgcagcctacgtttaccctgattactactgttcagactatgtcctgtcaaggtatgactactggggccaggggacccaggtcaccgtctcctca

SEQ ID NO: 4185 - DNA, 381 bp, synthetic construct
  source 1..381: mol_type = other DNA
gaggtgcagctggtggagtctgggggaggcttggtgcagcctggggggtctctgagactctcctgtgcagcctctggattcactttggattattatgccataggctggttccgccaggccccagggaaggagcgtgagggtgtctcatgtattagtacgagtggtgatagcacaaactatgcagactccgtgaagggccgattcaccatctccagagacaacgccaagaacacggtgtatctgcaaatgaacagcctgaaacctgaggacacagccgtttattactgtgcagcctacgtttaccctgatgactactgttcagattatgtcctgttaaggtatgactactggggccaggggacccaggtcaccgtctcctca

SEQ ID NO: 4186 - DNA, 381 bp, synthetic construct
  source 1..381: mol_type = other DNA
gaggtgcagctggtggagtctgggggaggcttggcgcagcctggggggtctctgagactctcctgtgcagcctctggattcactttggattattattccataggctggttccgccaggccccagggaaggagcgtgagggggtctcatgtattagtagtagtggtgatagcacaaactatgcagactccgtgaagggccgattcaccatctccagagacaacgccaagaacacggtgtatctgcaaatgaacagcctgaaacctgaggacacagccgtttattactgtgcagcctacgtttaccctgattactactgttcagaatatgtcaagttaaagtatgactactggggccaggggacccaggtcaccgtctcctca

SEQ ID NO: 4187 - DNA, 381 bp, synthetic construct
  source 1..381: mol_type = other DNA
gaggtgcagctggtggagtctgggggaggcttggtgcagcctggggggtctctgagactctcctgtgcagcctctggatccactttggattattatgccataggctggttccgccaggccccagggaaggagcgtgagggtgtctcatgtattagtagtagtggtggtagcacaaactatgcagactccgtgaagggccgattcaccatctccagagacaacgccaagaacacggtgtatctgcaaatgaacagcctgaaacctgaggacacagccgtttattactgtgcagcctacgtttaccctgattactactgttcagactatgacctgttaaggtatgactactggggccaggggacccaggtcaccgtctcctca

SEQ ID NO: 4188 - DNA, 381 bp, synthetic construct
  source 1..381: mol_type = other DNA
gaggtgcagctggtggagtctgggggaggcttggtgcagcctggggggtctctgagactctcctgtgcagcctctggattcactttggattattatgccataggctggttccgccaggccccagggaaggagcgtgagggtgtctcatgtattagtagtagtggtgatagcacaaactatgcagactccgtgaagggccgattcaccatctccagagacaacgccaagaacacggtgtatctgcaaatgaacagcctgaaacctgaggacacagccgtttattactgtgcagcctacgtttaccctgatcactactgttcagaatatgtcctgttaaagtatgactactggggccaggggacccaggtcaccgtctcctca

SEQ ID NO: 4189 - DNA, 381 bp, synthetic construct
  source 1..381: mol_type = other DNA
gaggtgcagctggtggagtctgggggaggcttggtgcagcctggggggtctctgagactctcctgtgcagcctctggattcactttggattattatgccataggctggttccgccaggccccagggaaggagcgtgagggtgtctcatgtattagtacgagtggtgatagcacaaactatgcagactccgtgaagggccgattcaccatctccagagacaacgccaagaacacggtgtatctgcaaatgaacagcctgaaacctgaggacacagccgtttattactgtgcagcctccgtttaccctgattactactgttcagattatgtcctgttaaggtatgactactggggccaggggacccaggtcaccgtctcctca

SEQ ID NO: 4190 - DNA, 381 bp, synthetic construct
  source 1..381: mol_type = other DNA
gaggtgcagctggtggagtctgggggaggcttggtgcagcctggggggtctctgagactctcctgtgcagcctctggattcactttggattattatgccataggctggttccgccaggccccagggaaggagcgtgagggggtctcatgtattagtagtagtggtgatagcacaaactatgcagactccgtgaagggccgattcaccatctccagagacaacgccaagaacacggtgtatctgcaaatgaacagcctgaaacctgaggacacagccgtttattactgtgcagactacgtttaccctgattactactgctcagactatgtcctgttaaagtatgactactggggccaggggacccaggtcaccgtctcctca

SEQ ID NO: 4191 - DNA, 381 bp, synthetic construct
  source 1..381: mol_type = other DNA
gaggtgcagctggtggagtctgggggaggcttggtgcagcctggggggtctctgagactctcctgtgcagcctctggattcactttggattattatgccataggctggttccgccaggccccagggaaggagcgtgagggggtctcatgtattagtagtagtggtgatagcacaaactatgcagactccgtgaagggccgattcaccatctccagagacaacgccaagaacacggtgtatctgcaaatgaacagcctgaaacctgaggacacagccgtttattactgtgcagcctacgttgaccctgattactactgctcagactatgtcctgttaaagtatgactactggggccaggggacccaggtcaccgtctcctca

SEQ ID NO: 4192 - DNA, 381 bp, synthetic construct
  source 1..381: mol_type = other DNA
gaggtgcagctggtggagtctgggggaggcttggtgcagcctggggggtctctgagactctcctgtgcagcctctggattcactttggattattatgccataggctggttccgccaggccccagggaaggagcgtgagggtgtctcatgtattagtagtagtggtggtagcacaaactatgcagactccgtgaagggccgattcaccatctccagagacaacgccaagaacacggtgtatctgcaaatgaacagcctgaaacctgaggacacagccgtttattactgtgcggcctacgattaccctgattactactgttcagactatgtcctgttaaaatatgactactggggccaggggacccaggtcaccgtctcctca

SEQ ID NO: 4193 - DNA, 381 bp, synthetic construct
  source 1..381: mol_type = other DNA
gaggtgcagctggtggagtctgggggaggcttggtgcagcctggggggtctctgagactctcctgtgcagcctctggattcactttggattattatgccataggctggttccgccaggccccagggaaggagcgtgagggtgtctcatgtattagtagtagtggtggtagcacaaactatgcagactccgtgaagggccgattcaccatctccagagacaacgccaagaacacggtgtatctgcaaatgaacagcctgaaacctgaggacacagccgtttattactgtgcagcctacgtttaccctgatgactcctgttcagactatgacctgttaaggtatgactactggggccaggggacccaggtcaccgtctcctca

SEQ ID NO: 4194 - DNA, 381 bp, synthetic construct
  source 1..381: mol_type = other DNA
gaggtgcagctggtggagtctgggggaggcttggtgcagcctggggggtctctgagactctcctgtgcagcctctggattcactttggattattatgccataggctggttccgccaggccccagggaaggagcgtgagggtgtctcatgtattagtagtagtggtggtagcacaaactatgcagactccgtgaagggccgattcaccatctccagagacaacgccaagaacacggtgtatctgcaaatgaacagcctgaaacctgaggacacagccgtttattactgtgcagtctacgtttaccctgattactactgttcagattatgtcctgttaaggtatgactactggggccaggggacccaggtcaccgtctcctca

SEQ ID NO: 4195 - DNA, 381 bp, synthetic construct
  source 1..381: mol_type = other DNA
gaggtgcagctggtggagtctgggggaggcttggtgcagcctggggggtctctgagactctcctgtgcagcctctggattcactttggattattatgccataggctggttccgccaggccccagggaaggagcgtgagggtgtctcatgtattagtagtagtggtggtagcaccaactatgcagactccgtgaagggccgattcaccatctccagagacaacgccaagaacacggtgtatctgcaaatgaacagcctgaaacctgaggacacagccgtttattactgtgcagcctacgtttaccctgatgactactgttcagactctgacctgttaaggtatgactactggggccaggggacccaggtcaccgtctcctca

SEQ ID NO: 4196 - DNA, 381 bp, synthetic construct
  source 1..381: mol_type = other DNA
gaggtgcagctggtggagtctgggggaggcttggtgcagcctggggggtctctgagactctcctgtgcagcctctggattcactttggattattatgccataggctggttccgccaggccccagggaaggagcgtgagggggtctcatgcattagtagtagtggtgatagcacaaactatgcagactccgtgaagggccgattcaccatctccagagacaacgccaagaacacggtgtatctgcaaatgaacagcctgaaacctgaggacacagccgtttattactgtgcagcctacgtttaccctgattactactgttcagactatgtcctgttaaggtatgaccactggggccaggggacccaggtcaccgtctcctca

SEQ ID NO: 4197 - DNA, 381 bp, synthetic construct
  source 1..381: mol_type = other DNA
gaggtgcagctggtggagtctgggggaggcttggtgcagcctggggggtctctgagactctcctgtgcagcctctggattcactttggattattatgccataggctggttccgccaggccccagggaaggagcgtgagggggtctcatgtattagtagtagtggtggtagcacaaactatgcagactccgtgaagggccgattcaccatctccagagacaacgccaagaacacggtgtatctgcaaatgaacagcctgaaacctgaggacacagccgtttattactgtgcagcctacgtttaccctgattactactgttcagactatgtcctgttaaggtatgaccactggggccaggggacccaggtcaccgtctcctca

SEQ ID NO: 4198 - DNA, 381 bp, synthetic construct
  source 1..381: mol_type = other DNA
gaggtgcagctggtggagtctgggggaggcttggtgcagcctggggggtctctgagactctcctgtgcagcctctggattcactttggattattatgccataggctggttccgccaggccccggggaaggagcgtgagggtgtctcatgtattagtagtagtggtggtagcacaaactatgcagactccgtgaagggccgattcaccatctccagagacaacgccaagaacacggtgtatctgcaaatgaacagcctgaaacctgaggacacagccgtttattactgtgcagcctacgtttaccctgattactactgttctgattatgtcctgttaaggtatgacgactggggccaggggacccaggtcaccgtctcctca

SEQ ID NO: 4199 - DNA, 381 bp, synthetic construct
  source 1..381: mol_type = other DNA
gaggtgcagctggtggagtctgggggaggcttggtgcagcctggggggtctctgagactctcctgtgcagcctctggattcactttggattattatgccataggctggttccgccaggccccagggaaggagcgtgagggtgtctcatgtattagtacgagtggtgatagcacaaactatgcagactccgtgaagggccgattcaccatctccagagacaacgccaagaacacggtgtatctgcaaatgaacagcctgaaacctgaggacacagccgtttattactgtgcagtctacgtttaccctgattactactgttcagattatgtcctgttaaggtatgactactggggccaggggacccaggtcaccgtctcctca

SEQ ID NO: 4200 - DNA, 381 bp, synthetic construct
  source 1..381: mol_type = other DNA
gaggtgcagctggtggagtctgggggaggcttggtgcagcctggggggtctctgagactctcctgtgcagcctctggattcactttggattattatgccataggctggttccgccaggccccagggaaggagcgtgagggggtctcatgtattagtagtagtggtggtagcacaaactatgcagactccgtgaagggccgattcaccatctccagagacaacgccaagaacacggtgtatctgcaaatgaacagcctgaaacctgaggacacagccgtttattactgtgcagcctacgtttaccctgattactactgttcagactatgtcctgtttaggtatgactactggggccaggggacccaggtcaccgtctcctca

SEQ ID NO: 4201 - DNA, 381 bp, synthetic construct
  source 1..381: mol_type = other DNA
gaggtgcagctggtggagtctgggggaggcttggtgcagcctggggggtctctgagactctcctgtgcagcctctggattcactttggattattatgccataggctggttccgccaggccccagggaaggagcgtgagggtgtctcatgtattagtagtagtggtggtagcacaaactatgcagactccgtgaagggccgattcaccatctccagagacaacgccaagaacacggtgtatctgcaaatgaacagcctgaaacctgaggacacagccgtttattactgtgcagactacgtttaccctgattactactgttcagactatgacctgttaaggtatgactactggggccaggggacccaggtcaccgtctcctca

SEQ ID NO: 4202 - DNA, 381 bp, synthetic construct
  source 1..381: mol_type = other DNA
gaggtgcagctggtggagtctgggggaggcttggtgcagcctggggggtctctgagactctcctgtgcagcctctggattcactttggattattatgccataggctggttccgccaggccccagggaaggagcgtgagggtgtctcatgtattagtagtagtggtggtagcacaaactatgcagactcagtgaagggccgattcaccatctccagagacaacgccaagaacacggtgtatctgcaaatgaacagcctgaaacctgaggacacagccgtttattactgtgcagcctacgttgaccctgattactactgttcagactatgacctgttaaggtatgactactggggccaggggacccaggtcaccgtctcctca

SEQ ID NO: 4203 - DNA, 381 bp, synthetic construct
  source 1..381: mol_type = other DNA
gaggtgcagctggtggagtctgggggaggcttggtgcagcctggggggtctctgagactctcctgtgcagcctctggattcactttggattattacgccataggctggttccgccaggccccagggaaggagcgtgagggtgtctcatgtattagtagtagtggtggtagcacaaactatgcagactccgtgaagggccgattcaccatctccagagacaacgccaagaacacggtgtatctgcaaatgaacagcctgaaacctgaggacacagccgtttattactgtgcagcctccgtttaccctgattactactgttcagactatgacctgttaaggtatgactactggggccaggggacccaggtcaccgtctcctca

SEQ ID NO: 4204 - DNA, 381 bp, synthetic construct
  source 1..381: mol_type = other DNA
gaggtgcagctggtggagtctgggggaggcttggtgcagcctgggggctctctgagactctcctgtgcagcctctggattcactttggattattatgccataggctggttccgccaggccccagggaaggagcgtgagggtgtctcatgtattagtagtagtggtggtagcacaaactatgcagactccgtgaagggccgattcaccatctccagagacaacgccaagaacacggtgtatctgcaaatgaacagcctgaaacctgaggacacagccgtttattactgtgcagcctacgattaccctgattactactgttcagactatgacctgttaaggtatgactactggggccaggggacccaggtcaccgtctcctca

SEQ ID NO: 4205 - DNA, 351 bp, synthetic construct; identical to SEQ ID NO: 2256
  source 1..351: mol_type = other DNA

SEQ ID NO: 4206 - DNA, 351 bp, synthetic construct
  source 1..351: mol_type = other DNA
gaggtgcagctggtggagtctgggggaggcttggtgcaggctggggggtctctgagactctcctgtgcagcctctggaataccactctatgccatgggttggtaccgccaggctccagggaagcagcgcgagttggtcgcaagtatcagtagtggcggtaatgcacactatgcagaattcgtgaagggccgattcaccatctcgagagacaacgccaacaagatggtgtatctggaaatgagcagtgtgaaacctgaggacacaggcgtctattactgtaatatatatcgaccgcaagtacctactaccagatactcttggggccaggggacccaggtcaccgtctcctca

SEQ ID NO: 4207 - DNA, 357 bp, synthetic construct
  source 1..357: mol_type = other DNA
gaggtgcagctggtggagtctgggggaggcttggtgcaggctggggggtctctgacgctctcctgtgcaacgtctggactgttcttcgctcagactgccatgggctggtaccgccaggcgccagggaagcagcgcgagttggtcgcaagtatcagtagtagtggtcagacacgctatgcagaagccgtgaagggccgattcagcgtctcgagagacaacgccgagaacacggtgtatctgcaaatgagaagtgtggaacctgaggacacaggcgtctattattgtaatatatatcgatcgcaagtacctctaaccagatactcttggggccaggggacccaggtcaccgtctcctca

SEQ ID NO: 4208 - DNA, 351 bp, synthetic construct
  source 1..351: mol_type = other DNA
gaggtgcagctggtggagtctgggggaggcttggtgcaggctggggggtctctgagactctcctgtgcagcctctggaatgcccagcgttgccatgggctggtaccgccaggctccagggaagcagcgcgaattggtcgcaagtatcagtagtggcggtaatacacactatgcagaattcgtgaagggccgattcaccatctcgagagacaacgccaagaagatggtgtatctgcaaatgagcagtgtgaaacctgaggacacaggcgtctattattgtaatatatatcgatcgcaagtaccgcctaccagatactcttggggccaggggacccaggtcaccgtctcctca

SEQ ID NO: 4209 - DNA, 351 bp, synthetic construct
  source 1..351: mol_type = other DNA
gaggtgcagctggtggagtctgggggaggcttggtgcaggctggggggtctctgagactctcctgtgcagcctctggaataccactcgttgccatgggttggtaccgccaggctccagggaagcagcgcgagttggtcgcaagtatcagtagtggcggaaatacacactatgcagaattcgtgaagggccgattcaccatctcgagagacaacgccaacaagatggtgtatctgcaaatgagcagtgtgaaacctgaggacacaggcgtctattattgtaatatatatcgatcgcaagtaccttttaccagatactcttggggccaggggacccaggtcaccgtctcctca

SEQ ID NO: 4210 - DNA, 351 bp, synthetic construct
  source 1..351: mol_type = other DNA
gaggtgcagctggtggagtctgggggaggcttggtgcaggctggggggtctctgagactctcctgtgcagcctcaggaataccactctatgccatgggttggtaccgccaggctccagggaagcagcgcgagttggtcgcaagtatcagtagtggcggtaatacacactatgcagaatttgtgaagggccgattcaccatctcgagagacaacgccaacaagatggtgtatctggaaatgagcagtgtgaaacctgaggacacaggcgtctattactgtaatatatatcgaccgcaagtacctactaccagatactcttggggccaggggacccaggtcaccgtctcctca

SEQ ID NO: 4211 - DNA, 351 bp, synthetic construct
  source 1..351: mol_type = other DNA
gaggtgcagctggtggagtctgggggaggcttggtgcaggctggggggtccctgagcctctcctgtgcagcctctggaatgcccttcgttgccatgggctggtaccgccaggctccagggaagcagcgcgagttggtcgcaagtatcagtactggcggtaatacacaatatgcagaattcgtgaagggccgattcaccatctcgagagacaacgccaagaagatggtgtatctgcaaatgagcagtgtgaaacctgaggacacaggcgtctattattgtaatatatatcgatcgcaagtatcgcctaccagatactcttggggccaggggacccaggtcaccgtctcctca

SEQ ID NO: 4212 - DNA, 354 bp, synthetic construct
  source 1..354: mol_type = other DNA
gaggtgcagctggtggagtctgggggaggcttggtacaggctggtgggtctctgagactctcctgtgcagtctctggaatacccttcgctctcgccatgggttggtaccgccaggctccagggaagcagcgcgagttggtcgcaagtatcagtagtggcggtaatacacactatgcagaattcgtgaagggccgattcaccatctcgagagacagcgccaacaagatggtgtatctgcagatgagcagtgtgaaacctgaggacgcaggcgtctattattgtaatatatatcgatcgcaaataccttctaccagatactcttggggccaggggacccaggtcaccgtctcctca

SEQ ID NO: 4213 - DNA, 351 bp, synthetic construct
  source 1..351: mol_type = other DNA
gaggtgcagctggtggagtctgggggaggcttggtgcaggctggggggtctctgagactctcctgtgcagcctctggaatgcccttcgttgccatgggctggtaccgccagactccagggaagcagcgcgagttggtcgcaagtatcggtagtggcggtgatacacgctatgcagaattcgtgaagggccgattcaccatctcgagagacaacgccaagaagatggtgtatctgcaaatgaacagtgtgaaacctgaggacgcaggcgtctattattgtaatatatatcgatcgcaagtatcgcctaccagatactcttggggccaggggacccaggtcaccgtctcctca

SEQ ID NO: 4214 - DNA, 357 bp, synthetic construct
  source 1..357: mol_type = other DNA
gaggtgcagctggtggagtctgggggaggcttggtgcaggctggggggtctctgagactctcctgtgcagtgtctgggataccctcccctctccctgccatgggttggtaccgccaggctccagggaagcagcgcgagttggtcgcaagcatcagtagtggcggtaatacacgctatgcagaattcgtgaagggccgattcaccatctcgagagacaacgccaacaagatggtgtatctgcaaatgagcagtgtgaaacctgaggacacaggcgtctattattgtaatatatatcgatcgcaaataccttctaccagatactcttggggccaggggacccaggtcaccgtctcctca

SEQ ID NO: 4215 - DNA, 351 bp, synthetic construct
  source 1..351: mol_type = other DNA
gaggtgcagctggtggagtctgggggaggcttggtgcaggctggggggtctctgagactctcctgtgcagcctctggaataccactctatgccatgggttggtaccgccaggctccagggaagcagcgcgagttggtcgcaagtatcagtagtggcggtaatacacactatgcagaattcgtgaagggccgattcaccatctcgagagacaacgccaacaagatggtgtatctggaaatgagcagtctgaaacctgaggacacaggcgtctattactgtaatatatatcgaccgcaagtacctactaccagatactcttggggccaggggacccaggtcaccgtctcctca

SEQ ID NO: 4216 - DNA, 351 bp, synthetic construct
  source 1..351: mol_type = other DNA
gaggtgcagctggtggagtctgggggaggcttggtgcaggctggggggtctctgagactctcctgtgcagcctctggaatgcccttcgttgccatggggtggtaccgccaggctccagggaagcagcgcgagttggtcgcaagtatcagtagtggcggtaatacacactatgcagaattcgtgaagggccgattcaccatctcgagagacaacgccaagaagatggtgtatctgcaaatgagcagtgtgaaacctgaggacacaggggtctattattgtaatatatatcgatcgcaagtatcgcctaccagatactcttggggccaggggacccaggtcaccgtctcctca

SEQ ID NO: 4217 - DNA, 357 bp, synthetic construct
  source 1..357: mol_type = other DNA
gaggtgcagctggtggagtctgggggaggcttggtgcaggctggggggtctctgagactctcctgtgaagcctctgggataccctcccctctccctgccatgggttggtaccgccaggctccagggaagcagcgcgagttggtcgcaagtatcagtagtggcggtaatacacgctatgcagaattcgtgaagggccgattcaccatctcgagagacaacgccaacaagatggtgtatctgcaaatgagcagtgtgaaacctgaggacacaggcgtctattattgtaatatttatcgatcgcaaataccttctaccagatactcctggggccaggggacccaggtcaccgtctcctca

SEQ ID NO: 4218 - DNA, 357 bp, synthetic construct
  source 1..357: mol_type = other DNA
gaggtgcagctggtggagtctgggggaggcttggtgcaggctggggggtctctgagactctcctgtgcagcctctggaatacccttcgctctcgctgccatgggttggtaccgccaggctccagggaagcagcgcgagttggtcgcaagtatcagtagtggcggtaatacacgctatgcagaattcgtgaagggccgattcaccatctcgagagacaacgccaacaagatggtgtatctgcaaatgagcagtgtgaaacctgaggacacaggcgtctattattgtaatatatatcgatcgcaagtaccttctaccagatactcttggggccaggggacccaggtcaccgtctcctca

SEQ ID NO: 4219 - DNA, 357 bp, synthetic construct
  source 1..357: mol_type = other DNA
gaggtgcagctggtggagtctgggggaggcttggtgcaggctggggggtctctgagactctcctgtgcagcctctggaatacccttcgctctccctgccatgggttggtaccgccaggctccagggaagcagcgcgaggtggtcgcaagtatcagtagtggcggcgatacacactatgcagaattcgtgaagggccgattcaccatctcgagagacaacgccaacaagatggtgtatctgcaaatgagcagtgtgaaacctgaggacacaggcgtctattattgtaatatatatcgatcgcaggtaccaactaccagatactcttggggccaggggacccaggtcaccgtctcctca

SEQ ID NO: 4220 - DNA, 357 bp, synthetic construct
  source 1..357: mol_type = other DNA
gaggtgcagctggtggagtctgggggaggcttggtgcaggctggggggtctctaagactctcctgtgcagcctctggaatgcccttcgctctcactgccatgggttggtaccgccaggctccagggaagcagcgcgagctggtcgcaagtatcagtagtggcggtaatacacactatgcagaattcgtgaagggccgattcaccatctcgagagacaacgccaacaagatgctgtttctgcaaatgagcagtgtgaaacctgaggacacaggcgtctattattgtaatatatatcgatcgcaagtacctactaccagatactcttggggccaggggacccaggtcaccgtctcctca

SEQ ID NO: 4221 - DNA, 351 bp, synthetic construct
  source 1..351: mol_type = other DNA
gaggtgcagctggtggagtctgggggaggcttggtgcaggctggggggtctctgagactctcctgcgcagcctctggaatgcccctcactgccatgggttggtaccgccaggctccggggaagcagcgcgagttggtcgcaagtatcagtagtggcggtaatacacgctatgcagaattcgtgaagggccgattcaccatctcgagagacaacgccaacaagatggtgtttctgcaaatgagcagtgtgaaacctgaggacacaggcgtctattattgtaatatatatcgatcgcaagtccctcttaccagatactcttggggccaggggacccaggtcaccgtctcctca

SEQ ID NO: 4222 - DNA, 357 bp, synthetic construct
  source 1..357: mol_type = other DNA
gaggtgcagctggtggagtctgggggaggcttggtgcaggctggggggtctctgagactctcctgtgcagcctctgggataccctcccctctccctgccatgggttggtaccgccaggctccaggcgagcagcgcgagttggtcgcaagtatcagtagtggcggtaatacacgctatgcagaattcgtgaagggccgattcaccatctcgagagacaacgccaacaagatggtgtatctgcaaatgagcagtttgaaacctgaggacacaggcgtctattattgtaatatatatcgatcgcaagtaccttctaccagattcgcttggggccaggggacccaggtcaccgtctcctca

SEQ ID NO: 4223 - DNA, 351 bp, synthetic construct
  source 1..351: mol_type = other DNA
gaggtgcagctggtggagtctgggggaggcttggtgcaggctggggggtctctgagactctcctgtgcagcctctggaatgcccgccgttgccatgggctggtaccgccaggctccagggaagcagcgcgagttggtcgcaagtatcagtagtggcgataatacacagtatgcagaattcgtgaagggccgattcaccatctcgagagacaacgccaagaagatggtgtatctgcaaatgagcagtgtgaaacctgaggacacaggcgtctattattgtaatatatatcgatcgcaagtaccgcctaccagatactcttggggccaggggacccaggtcaccgtctcctca

SEQ ID NO: 4224 - DNA, 357 bp, synthetic construct
  source 1..357: mol_type = other DNA
gaggtgcagctggtggagtctgggggaggcttggtgcaggctggggggtctctgacgctctcctgtgcaacgtctggactgttcttcgctcagactgccatgggctggtaccgccaggcgccagggaagcagcgcgagttggtcgcaagtatcagtagtagtggtcagacacgctatgcagaagccgtgaagggccgattcaccgtctcgagagacaacgccaagaacacggtgtatctgcaaatgagaagtgtggaacctgaggacacaggcgtctattattgtaatatatatcgatcgcaagtacctctaaccagatactcttggggccaggggacccaggtcaccgtctcctca

SEQ ID NO: 4225 - DNA, 357 bp, synthetic construct
  source 1..357: mol_type = other DNA
gaggtgcagctggtggagtctgggggaggcttggtgcaggctggggggtctctgagactctcctgtgcagcctctggaatacccttcgctctcactgccatgggttggtaccgccaaactccagggaagcagcgcgagttggtcgcaagtatcagtagtggcggtgatacacgctatgcagaattcgtgaagggccgattcaccatctcgagagacaacgccaacaagatggtgtatctgcaattgagcagtgtgaaacctgaggacacaggcgtctattattgtaatatatatcgatcgcaaataccgcctaccagatactcttggggccaggggacccaggtcaccgtctcctca

SEQ ID NO: 4226 - DNA, 351 bp, synthetic construct
  source 1..351: mol_type = other DNA
gaggtgcagctggtggagtctgggggaggcttggtgcaggctggggggtctctgagactctcctgtgcagcctctggaatgcccttcgttgccatgggctggtaccgccaggctccagggaagcagcgcgaattggtcgcaagtatcagtagtggcggtgctacacaatatgcagaattcgtgaagggccgattcaccatctcgagagacaacgccaagaagatggtgtatctgcaaatgagcagtgtgaaacctgaggacacaggagtctattattgtaatatatatcgatcgcagataccgcctaccagatactcttggggccaggggactcaggtcaccgtctcctca

SEQ ID NO: 4227 - DNA, 357 bp, synthetic construct
  source 1..357: mol_type = other DNA
gaggtgcagctggtggagtctgggggaggcttggtgcaggctggggggtctctgagactctcctgtgcagcccatgggataccctcccctctccctgccatgggttggtaccgccaggctccagggaagcagcgcgagttggtcgcaagtatcagtagtgccggcaatacacactatgcagaattcgtgaagggccgattcaccatctcgagagacaacgccaacaagatggtgtatctgcaaatgagcagtgtgaaacctgaggacacaggcgtctattattgtaatatatatcgatcgcaagtaccgtctactagatactcttggggccaggggacccaggtcaccgtctcctca

SEQ ID NO: 4228 - DNA, 351 bp, synthetic construct
  source 1..351: mol_type = other DNA
gaggtgcagctggtggagtctgggggaggcttggtgcaggctggggggtctctgagactctcctgcgcggcctctggaatgcccgccgttgccatgggctggtaccgccaggctccagggaagcagcgcgagctggtcgcaagtatcagtagtggcggtaatacacactatgcagaattcgtgaagggccgattcaccatctcgagagacaacgccaagaagatggtgtatctgcaaatgagcagcgtgaaacctgaggacacaggcgtctattattgtaatatatatcgatcgcaagtaccgtttaccagatactcttggggccaggggacccaggtcaccgtctcctca

SEQ ID NO: 4229 - DNA, 351 bp, synthetic construct
  source 1..351: mol_type = other DNA
gaggtgcagctggtggagtctgggggaggcttggtgcaggctggggggtctctgagactctcctgtgctgcctctggaataccactctatgccatgggttggtaccgccaggctccagggaagcagcgcgagttggtcgcaagtatcagtagtggcggtaatacacactatgcagaattcgtgaagggccgattcaccatctcgagagacaacgccaacaagatggtgtatctggaaatgagcagtctgaaacctgaggacacaggcgtctattactgtaatatatatcgaccgcgagtacctactaccagatactcttggggccaggggacccaggtcaccgtctcctca

SEQ ID NO: 4230 - DNA, 357 bp, synthetic construct
  source 1..357: mol_type = other DNA
gaggtgcagctggtggagtctgggggaggcttggtgcaggctggggggtctctgagactctcctgtgcagcctctgggataccctcccctctccctgccatgggttggtaccgccaggctccagggaagcagcgcgagttggtcgcaagtatcagtagtgccggtaatacacactatgcagaattcgtggagggccgattcaccatctcgagagacaacgccaacaagatggtgtatctgcaaatgagcagtgtgagacctgaggacacaggcgtctattattgtaatatatttcgatcgcaaatacctactaccagatactcttggggccaggggacccaggtcaccgtctcctca

SEQ ID NO: 4231 - DNA, 351 bp, synthetic construct
  source 1..351: mol_type = other DNA
gaggtgcagctggtggagtctgggggaggcttggtgcaggctggggggtctctgagactctcctgtgcagcctctggaataccactcgttgccatgggttggtaccgccaggctccagggaagcagcgcgagttggtcgcaagtatcagtagtggcgggaatacacactatgcagaattcgtgaagggccgattcaccatctcgagagacaacgccaacaagatggtgtatctgcaaatgagcagtgtgaaacctgaggacacaggcgtctattattgtaatatatatcgatcgcaagtaccttctaccagatactcttggggccaggggacccaggtcaccgtctcctca

SEQ ID NO: 4232 - DNA, 351 bp, synthetic construct
  source 1..351: mol_type = other DNA
gaggtgcagctggtggagtctgggggaggcttggtgcaggctggggggtctctgagactctcctgtgcagcctctggaataccactctatgccatgggttggtaccgccaggctccagggaagcagcgcgagttggtcgcaagtatcagtagtggcggtaatacacactatgcagaattcgtgaagggccgattcaccatctcgagagacaacgccaacaagatggtgtatctggaaatgagcagtgtgaaacctgaggacacaggcgtctattactgtaatatatatcgaccgcgagtacctactaccagatactcttggggccaggggacccaggtcaccgtctcctca

SEQ ID NO: 4233 - DNA, 348 bp, synthetic construct
  source 1..348: mol_type = other DNA
gaggtgcagctggtggagtctgggggaggcttggtgcaggctggggggtctctgagactctcctgtgcagcctctggaatacccttcgctctcgcttggtaccgccaggctccagggaagcagcgcgagttggtcgcaagtatcagtagtggcggtaatacacagtatgcagaattcgtgaagggccgattcaccatctcgagagacaacgccaacaagatggtgtatctgcaaatgagcagtgtgaaacctgaggacacaggcgtctattattgtaatatatatcgatcgcaagtaccttttaccagatactcttggggccaggggacccaggtcaccgtctcctca

SEQ ID NO: 4234 - DNA, 351 bp, synthetic construct
  source 1..351: mol_type = other DNA
gaggtgcagctggtggagtctgggggaggcttggtgcaggctggggggtctctgagactctcctgtgcagcctctggaatgcccctcgttgccatgggctggtaccgccaggctccagggaagcagcgcgagttggtcgcaagtatcagtagtggcggtaatacaggctatgcagaattcgtgaagggccgattcaccatctcgagagacaacgccaagaagatggtgtatctgcaaatgaacagtgtgaaacctgaggacacaggcgtctattattgtaatatatatcgatcgcaaggaccgcctaccagatactcttggggccaggggacccaggtcaccgtctcctca

SEQ ID NO: 4235 - DNA, 351 bp, synthetic construct
  source 1..351: mol_type = other DNA
gaggtgcagctggtggagtctgggggaggcttggtgcaggctggggggtctctgagactctcctgtgcagcctctggaataccactctatgccatgggttggtaccgccaggctccagggaagcagcgcgagttggtcgcaagtatcagtagtggcggtaatacacactattcagaattcgtgaagggccgattcaccatctcgagagacaacgccaataagatggtgtatctggaaatgagcagtgtgaaacctgaggacacaggcgtctattactgtaatatatatcgaccgcaaatacctactaccagatactcttggggccaggggacccaggtcaccgtctcctca

SEQ ID NO: 4236 - DNA, 351 bp, synthetic construct
  source 1..351: mol_type = other DNA
gaggtgcagctggtggagtctgggggagacctggtgcaggctggggggtctctgagactctcctgtgcagcctctggaataccactctatgccatgggttggtaccgccaggctccagggaagcagcgcgagttggtcgcaagtatcagtagtggcggtaatacacactatgcagaattcgtgaagggccgattcaccatcttgagagacaacgccaacaagatggtgtatctggaaatgagcagtctgaaacctgaggacacaggcgtctattactgtaatatatatcgaccgcgagtacctactaccagatactcttggggccaggggacccaggtcaccgtctcctca

SEQ ID NO: 4237 - DNA, 351 bp, synthetic construct
  source 1..351: mol_type = other DNA
gaggtgcagctggtggagtctgggggaggcttggtgcaggctggggggtctctgagactctcctgtgcagcctctggaatgccctcagttgccatgggctggtaccgccaggctccagggaagcagcgcgagttggtcgcaagtatcggtagtggcggtgatacacgctatgcagaattcgtgaagggccgattcaccatctcgagagacaacgccaagaagatggtgtatctgcaaatgagcagtgtgaaacctgaggacacaggcgtctattattgtaatatatatcgatcgcaagtacgacctaccagatactcttggggccaggggacccaggtcaccgtctcctca

SEQ ID NO: 4238 - DNA, 351 bp, synthetic construct
  source 1..351: mol_type = other DNA
gaggtgcagctggtggagtctgggggaggcttggtgcaggctggggggtctctgagactctcctgtgcagcctctggaatgcccctcgttgccatgggctggtaccgccaggctccagggaagcagcgcgagttggtcgcaagtatcagtagtggcggtaatacaggctatgcagaattcgtgaagggccgattcaccatctcgagagacaacgccaagaagatggtgtatctgcaaatgaacagtgtgaaacctgaggacacaggcgtctattattgtaatatatatcgatcgcaagtacagcctaccagatactcttggggccaggggacccaggtcaccgtctcctca

SEQ ID NO: 4239 - DNA, 351 bp, synthetic construct
  source 1..351: mol_type = other DNA
gaggtgcagctggtggagtctgggggaggcttggtgcaggctggggggtctctgagactctcctgtgcagcctctggaataccactctatgccatgggttggtaccgccaggctccagggaagcagcgcgagttggtcgcaagtatcagtagtggcggtaatacacactatgcagaattcgtgaagggccgattcaccatctcgagagacaacgccaacaagatggtgtatctggaaatgagcagtctgaaacctgaggacacaggcgtctattactgtaatatatatcgaccgcaaggacctactaccagatactcttggggccaggggacccaggtcaccgtctcctca

SEQ ID NO: 4240 - DNA, 351 bp, synthetic construct
  source 1..351: mol_type = other DNA
gaggtgcagctggtggagtctgggggaggcttggtgcaggctggggggtctctgagactctcctgtgcagcctctggaataccactctatgccatgggttggtaccgccaggctccagggaagcagcgcgagttggtcgcaagtatcagtagtggcggtaatacacactatgcagaattcgtgaagggccgattcaccatctcgagagacaacgccaacaagatggtgtatctggaaatgagcagtgtgaaacctgaggacacaggcgtctattactgtaatatatatcgaccgcaaggacctactaccagatactcttggggccaggggacccaggtcaccgtctcctca

SEQ ID NO: 4241 - DNA, 351 bp, synthetic construct
  source 1..351: mol_type = other DNA
gaggtgcagctggtggagtctgggggaggcttggtgcaggctggggggtctctgagactctcctgtgcagcctctggaatgcccctcgttgccatgggctggtaccgccaggctccagggaagcagcgcgagttggtcgcaagtatcagtagtggcggtaatacaggctatgcagaattcgtgaagggccgattcaccatctcgagagacaacgccaagaagatggtgtatctgcaaatgaacagtgtgaaacctgaggacacaggcgtctattattgtaatatatatcgaccgcaagtaccgcctaccagatactcttggggccaggggacccaggtcaccgtctcctca

SEQ ID NO: 4242 - DNA, 351 bp, synthetic construct
  source 1..351: mol_type = other DNA
gaggtgcagctggtggagtctgggggaggcttggtgcaggctggggggtctctgagactctcctgtgcggcctctggaatgcccgccgttgccatgggctggtaccgccaggctccagggaagcagcgcgagttggtcgcaagtatcagtagtggcggcaatacacactatgcagaattcgtgaagggccgattcaccatctcgagagacaacgccaagaagatggtgtatctgcaaatgagcagcgtgaaacctgaggacacaggcgtctattattgtaatatatatcgaccgcaagtaccgcctaccagatactcttggggccaggggacccaggtcaccgtctcctca

SEQ ID NO: 4243 - DNA, 357 bp, synthetic construct
  source 1..357: mol_type = other DNA
gaggtgcagctggtggagtctgggggaggcttggtgcaggctggggggtctctgagactctcctgtgcagcctctggaatacccttcgctctccctgccatgggttggtaccgccaggctccagggaacgagcgcgagctagtcgcaagtatcagtagtggcggtaacacaagctatgcagaattcacgaagggccgattcaccatctcgagagacaacgccaacaagatggtgtatctgcaaatgagcagtgtgagacctgaggacacaggcgtctattattgtaatatatatcgatcgcgagtaccttctaccagatactcttggggccaggggacccaggtcaccgtctcctca

SEQ ID NO: 4244 - DNA, 357 bp, synthetic construct
  source 1..357: mol_type = other DNA
gaggtgcagctggtggagtctgggggaggcttggtgcaggctggggggtctctgagactctcctgtgcagcctctggaatacccttcgctctcactgccatgggttggtaccgccaaactccagggaagcagcgagagttggtcgcaagtatcagtagtggcggtgatataggctatgcagaattcgtgaagggccgattcaccatctcgagagacaacgccaacaagatggtgtatctgcaattgagcagtgtgaaacctgaggacacaggcgtctattattgtaatatatatcgatcgcaaataccgcctaccagatactcttggggccaggggacccaggtcaccgtctcctca

SEQ ID NO: 4245 - DNA, 357 bp, synthetic construct
  source 1..357: mol_type = other DNA
gaggtgcagctggtggagtctgggggaggcttggtgcaggctggggggtctctgagactctcctgtgcagcctctggaatacccttcgctctccctgccatgggttggtaccgccaggctccggggaagcagcgcgagttggtcgcaagtatcagtagtggcggcaatacacactatgcagaattcgtgaagggccgattcaccatctcgagagacaacgccaacaagatggtgtatctgcaaatgagcagtgtgaaacctgaggacacaggcgtctattattgtaatatatatcgatcgcaagtaccaactaccagatactcttggggccaggggacccaggtcaccgtctcctca

SEQ ID NO: 4246 - DNA, 357 bp, synthetic construct
  source 1..357: mol_type = other DNA
gaggtgcagctggtggagtctgggggaggcttggtgcaggctggggggtctctgagactctcctgtgcagcctctggaatacccttcgctctccctgccatgggttggtaccgccaggctccagggaagcagcgcgagttagtcgcaagtatcagtagtggcggtaatacaagctatgcagaattcacgaagggccgattcaccatctcgagagacaacgccaacaagatggtgtatctgcaaatgagcagtgtgaaacctgaggacacaggcgtctattattgtaatatatatcgatcgcgagtaccttctaccagatactcttggggccaggggacccaggtcaccgtctcctca

SEQ ID NO: 4247 - DNA, 348 bp, synthetic construct
  source 1..348: mol_type = other DNA
gaggtgcagctggtggagtctgggggaggcttggtgcaggctgggggttctctgagactctcctgtgtagcctctggaatacccttcgcactcgcttggtaccgccaggctccagggaagcagcgcgagttggtcgcaagtatcagtagtggcggtaatacacagtatgcagaattcgtgaagggccgattcaccatctcgagagacaacgccaacaagatggtgtatctgcaaatgagcagtgtgaaacctgaggacacaggcgtctattattgtaatatatatcgatcgcaagtaccttttaccagatactcttggggccaggggacccaggtcaccgtctcctca

SEQ ID NO: 4248 - DNA, 351 bp, synthetic construct
  source 1..351: mol_type = other DNA
gaggtgcagctggtggagtctgggggaggcttggtgcaggctggggggtctctgggactctcctgtgcagcctctggaataccactcgttgccatgggttggtaccgccaggctccagggaagcagcgcgagttggtcgcaagtatcagtagtggcggaaatacacactatgcagaattcgtgaagggccgattcaccatctcgagagacaacgccaacaagatggtgtatctgcaaatgagcagtgtgaaacctgaggacacaggcgtctattattgtaatatatatcgatcgcaagtaccctttaccagatactcttggggccaggggacccaggtcaccgtctcctca

SEQ ID NO: 4249 - DNA, 357 bp, synthetic construct
  source 1..357: mol_type = other DNA
gaggtgcagctggtggagtctgggggaggcttggtgcaggctggggggtctctgagactctcctgtgcagcctctggaatacccttcgctctcactgccatgggttggtaccgccaggctccagggaagcagcgcgagttggtcgcaagtatcagtagtggcgctaatacacactatgcagaattcgtgaagggccgattcaccatctcgagagacaacgccaacaagatgctgtatctgcaaatgagcagtgtgaaacctgaggacactggcgtctattattgtaatatatatcgatcgcaagtacctactaccagatactcttggggccaggggacccaggtcaccgtctcctca

SEQ ID NO: 4250 - DNA, 351 bp, synthetic construct
  source 1..351: mol_type = other DNA
gaggtgcagctggtggagtctgggggaggcttggtgcaggctggggggtctctgagactctcctgtgcaacctctggaatgcccttcgttgccatgggctggtaccgccaggctccagggaagcagcgcgagttggtcgcaagtatcagtagtggcggtgatacacactatgcagaattcgtgaagggccgattcaccatctcgagagacaacgccaagaagatggtgtatctgcaaatgaccagtgtgaaacctgaggacacaggcgtctattattgtaatatatatcgatcgcagataccgcctaccagatactcttggggccaggggacccaggtcaccgtctcctca

SEQ ID NO: 4251 - DNA, 351 bp, synthetic construct
  source 1..351: mol_type = other DNA
gaggtgcagctggtggagtctgggggaggcttggtgcaggctggggggtctctgagactctcctgtgcagcctctggaataccactctatgccatgggttggtaccgccaggctccagggaagcagcgcgagttggtcgcaagtatcagtagtggcggtaatacacactatgcagaattcgtgaagggcagattcaccatctcgagagacaacgccaacaagatggtgtatctggaaatgagtagtgtgaaacctgaggacacaggcgtctattactgtaatatatatcggccgcaaatacctactaccagatactcttggggccaggggacccaggtcaccgtctcctca

SEQ ID NO: 4252 - DNA, 351 bp, synthetic construct
  source 1..351: mol_type = other DNA
gaggtgcagctggtggagtctgggggaggcttggtgcaggctggggggtctctgagactctcctgtgcagcctctggaataccactctatgccatgggttggtaccgccaggctccagggaagcagcgcgagttggtcgcaagtatcagtagtggcggtaatacacactatgcagaattcgtgaagggccgattcaccatctcgagagacaacgccaacaagatggtgtatctggaaatgagcactgtgaaacctgaggacacaggcgtctattactgtaatatatatcgaccgctagtacctactaccagatactcttggggccaggggacccaggtcaccgtctcctca

SEQ ID NO: 4253 - DNA, 351 bp, synthetic construct
  source 1..351: mol_type = other DNA
gaggtgcagctggtggagtctgggggaggcttggtgcaggccggggggtctctgagactctcctgtgcagcctctggaatgcccttcgttgccatgggctggtaccgccaggctccagggaagcagcgcgagttggtcgcaagtatcagtagtggcggtgatacacgctatgcagaattcgtgaagggccgattcaccatctcgagagacaacgacaagaagatggtgtatctgcaaatggacagtgtgaaacctgatgatacaggcgtctattattgtaatatatatcgatcgcgagtaccgcctaccagatactcttggggccaggggacccaggtcaccgtctcctca

SEQ ID NO: 4254 - DNA, 357 bp, synthetic construct
  source 1..357: mol_type = other DNA
gaggtgcagctggtggagtctgggggaggcttggtgcaggctggggggtctctgagactctcctgtgcagcctctggaatacccttcgctctccctgccatgggttggtaccgccaggctccagggaagcagcgcgagttggtcgcaagtatcagtagtggcggtaatacacactatgcagaattcgtgaagggccgattcaccatctcgagagacaacgccaacaagatggtgtatctgcaaatgagcagtgtgaaacctgaggacacaggcgtctattattgtaatatatatcgatcgcgagtacctcctactagatactcttggggccaggggacccaggtcaccgtctcctca

SEQ ID NO: 4255 - DNA, 357 bp, synthetic construct
  source 1..357: mol_type = other DNA
gaggtgcagctggtggagtctgggggaggcttagtgcaggctggggggtctctgagactctcctgtgcagcctctggaatacccttcgctctccctgccatgggttggtaccgccaggctccagggaagcagcgcgagttggtcgcaagtatcagtagtgtcggtaatacacactatgcagaattcgtgaagggccgattcaccatctcgagagacaacgccaacaagatggtgtatttgcaaatgagcagtgtgaaacctgaggacacaggcgtctattattgtaatatatatcgatcgcatgtacctcctactagatactcttggggccaggggacccaggtcaccgtctcctca

SEQ ID NO: 4256 - DNA, 351 bp, synthetic construct
  source 1..351: mol_type = other DNA
gaggtgcagctggtggagtctgggggaggcttggtgcaggctggggggtctctgagactctcctgtgcagcctctggaatgcccgccgttgccatgggctggtaccgccaggctccagggaagcagcgcgagttggtcgcaagtatcagtagtggcgataatacacagtatgcagaattcgtgaagggccgattcaccatctcgagagacaacgccaagaagatggtgtatctgcaaatgagcagtgtgaaacctgaggacacaggcgtctattattgtaatatatatcgatcgcaaggaccgcctaccagatactcttggggccaggggacccaggtcaccgtctcctca

SEQ ID NO: 4257 - DNA, 351 bp, synthetic construct
  source 1..351: mol_type = other DNA
gaggtgcagctggtggagtctgggggaggcttggtgcaggctggggggtctctgagactctcctgtgcagcctctggaataccactctatgccatgggttggtaccgccaggctccagggaagcagcgcgagttggtcgcaagtatcagtagtggcggtaatacacactatgcagaattcgtgaagggccgattcaccatctcgagagacaacgccaacaagatggtgtatctggaaatgcgcagtgtgaaacctgaggacacaggcgtctattactgtaatatatatcgaccgcaaatacctactaccagatactcttggggccaggggacccaggtcaccgtctcctca

SEQ ID NO: 4258 - DNA, 351 bp, synthetic construct
  source 1..351: mol_type = other DNA
gaggtgcagctggtggagtctgggggaggcttggtgcaggctggggggtctctgagactctcctgtgcagcctctggaatgcccttcgttgccatgggctggtaccgccaggctccagggaagcagcgcgagttggtcgcaagtatcagtactggcggtaatacacactatgcagaattcgtggagggccgattcaccatctcgagagacaacgccaagaagatggtgtatctgcaaatgagcagtgtgaaacctgaggacacaggcgtctattattgtaatatatatcgatcgcaagtaccgcctaccagatactcttggggccaggggacccaggtcaccgtctcctca

SEQ ID NO: 4259 - DNA, 351 bp, synthetic construct
  source 1..351: mol_type = other DNA
gaggtgcagctggtggagtctgggggaggcttggtgcaggctggggggtctctgagactctcctgtgcagcctctggaataccactctatgccatgggttggtaccgccaggctccagggaagcagcgcgagttggtcgcaagtatcagtagtggcggtaatacacactatgcagaattcgtgaagggccgattcaccatctcgagagacaacgccaacaagatggtgtatctggaaatgagcagtgtgaaacctgaggacacaggcgtctattactgtaatatatatcgaccgctagtacctactaccagatactcttggggccaggggacccaggtcaccgtctcctca

SEQ ID NO: 4260 - DNA, 351 bp, synthetic construct
  source 1..351: mol_type = other DNA
gaggtgcagctggtggagtctgggggaggcttggtgcaggctggggggtctctgagactctcctgtgcagcctctggaatgcccagcgttgccatgggctggtaccgccaggctccagggaagcagcgcgaattggtcgcaagtatcagtagtggcggtaatacacactatgcagaattcgtgaagggccgattcaccatctcgagagacaacgccaagaagatggtgtatctgcaaatgagcagtgtgaaacctgaggacacaggcgtctattattgtaatatttatcgttcgcaaggaccacctaccagatactcttggggccaggggacccaggtcaccgtctcctca

SEQ ID NO: 4261 - DNA, 351 bp, synthetic construct
  source 1..351: mol_type = other DNA
gaggtgcagctggtggagtctgggggaggcttggtgcaggctggggggtctctgagactctcctgtgcagcctctggaatgcccctcgttgccatgggctggtaccgccaggctccagggaagcagcgcgagttggtcgcaagtatcagtagtggcggtaatacaggctatgcagaattcgtgaagggccgattcaccatctcgagagacaacgccaagaagatggtgtatctgcaaatgaacagtgtgaaacctgaggacacaggcgtctattattgtaatatatatcgaacgcaagtaccgcctaccagatactcttggggccaggggacccaggtcaccgtctcctca

SEQ ID NO: 4262 - DNA, 351 bp, synthetic construct
  source 1..351: mol_type = other DNA
gaggtgcagctggtggagtctgggggaggcttggtgcaggctggggggtctctgagactctcctgtgcagcctctggaatgcccagcgttgccatgggctggtaccgccaggctccagggaagcagcgcgaattggtcgcaagtatcagtagtggcggtaatacacactatgcagaattcgtgaagggccgattcaccatctcgagagacaacgccaagaagatggtgtatctgcaaatgagcagtgtgaaacctgaggacacaggcgtctattattgtaatatatatcgaacgcaagtaccacctaccagatactcttggggccaggggacccaggtcaccgtctcctca

SEQ ID NO: 4263 - DNA, 351 bp, synthetic construct
  source 1..351: mol_type = other DNA
gaggtgcagctggtggagtctgggggaggcttggtgcaggctggggggtctctgagactctcctgtgcggcctctggaatgcccgccgttgccatgggctggtaccgccaggctccagggacgcagcgcgagttggtcgcaagtatcagtagtggcggtaatacacactatgcagaattcgtgaagggccgattcaccatctcgagagacaacgccaggaagatggtgtatctgcaaatgagcagcgtgaaacctgaggacacaggcgtctattattgtaatatatatcgaccgcaagtaccgcctaccagatactcttggggccaggggacccaggtcaccgtctcctca

SEQ ID NO: 4264 - DNA, 357 bp, synthetic construct
  source 1..357: mol_type = other DNA
gaggtgcagctggtggagtctgggggaggcttggtgcaggctggggggtctctgagactctcctgtgcagcctctgggataccctcccctctccctgccatgggttggtaccgccaggctccaggcgagcagcgcgagttggtcgcaagtatcagtagtggcggtaatacacgctatgcagaatccgtgaagggccgattcaccatctcgagagacaacgccaacaagatggtgtatctgcaaatgagcagtttgaaacctgaggacacaggcgtctattattgtaatatatatcgatcgcaagtaccttctaccagattcgcttggggccaggggacccaggtcaccgtctcctca

SEQ ID NO: 4265 - DNA, 357 bp, synthetic construct
  source 1..357: mol_type = other DNA
gaggtgcagctggtggagtctgggggaggcttggtgcagactggggggtctctaagactctcctgtgcagcctctggcaagttcttcgctctcgctgccatgggctggtaccgccaggctccagggaagcagcgcgagttggtcgcaagtatcagtagtggtagtaatacacagtatgcagaattcgtgaagggccggttcaccatctcgagagacaacgccaagaacacgctttatctacaaatgaatagtgtgaaacctgaggacacaggcgtctattattgtaatatatatcgatctcaggtaccacctaccagatactcttggggccaggggacccaggtcaccgtctcctca

SEQ ID NO: 4266 - DNA, 357 bp, synthetic construct
  source 1..357: mol_type = other DNA
gaggtgcagctggtggagtctgggggaggcttggtgcagcctggggggtctctgagactctcctgtgcagcctctgggataccctcccctctccctgccatgggttggtaccgccaggctccaggcgagcagcgcgagttggtcgcaagtatcagtagtggcggtaatacacgctatgcagaattcgtgaagggccgattcaccatctcgagagacaacgccaacaagatggtgtatctgcaaatgagcagtttgaaacctgaggacacaggcgtctattattgtaatatatatcgatcgcaagtaccttctaccagattcgcttggggccaggggacccaggtcaccgtctcctca

SEQ ID NO: 4267 - DNA, 357 bp, synthetic construct
  source 1..357: mol_type = other DNA
gaggtgcagctggtggagtctgggggaggcttggtgcaggctggggggtctctgagactctcctgtgcagcctctggaatacccttcgctctccctgccatgggttggtaccgccaggctccaggtaagcagcgcgagttagtcgcaagtatcagtagtggcggtaatacaacctatgcagaattcacgaagggccgattcaccatctcgagagacaacgccaacaagatggtgtatctgcagatgagcagtgtgaaacctgaggacacaggcgtctattattgtaatatatatcgatcgggagtaccttctaccagatactcttggggccaggggacccaggtcaccgtctcctca

SEQ ID NO: 4268 - DNA, 357 bp, synthetic construct
  source 1..357: mol_type = other DNA
gaggtgcagctggtggagtctgggggaggcttggtgcaggctggggggtctctgagactctcctgtgcaacctctggaatacccttcgccctccctgccatgggttggtaccgccaggctccagggaagcagcgcgagttagtcgcaagtatcagtagtggcggtaatacaaattatgcagaattcacgaagggccgattcaccatctcgagagacaacgccaacaagatggtgtatctgcaaatgagcagtgtgaaacctgaggacacaggcgtctattattgtaatatatatcgatcgggagtaccttctaccagatactcttggggccaggggacccaggtcaccgtctcctca

SEQ ID NO: 4269 - DNA, 351 bp, synthetic construct
  source 1..351: mol_type = other DNA
gaggtgcagctggtggagtctgggggaggcttggtgcaggctggggggtctctgagactctcctgtgcagcctctggaataccactcgttgccatgggttggtaccgccaggctccagggaagcagcgcgagttggtcgcaagtatcagcagtggcggtaatacacgctatgcagaattcgtgaagggccgattcaccatctcgagagacaacgccaacaagatggtgtatctgcaaatgagcagtgtgaaacctgaggacacaggcgtgtattattgtaatatatatcgatccgaagtacctcctaccagatactcttggggccaggggacccaggtcaccgtctcctca

SEQ ID NO: 4270 - DNA, 351 bp, synthetic construct
  source 1..351: mol_type = other DNA
gaggtgcagctggtggagtctgggggaggcttggtgcaggctggggggtctctgagactctcctgtgcagcctctggaatgcccttggttgccatgggctggtaccgccaggctccagggaagcagcgcgagttggtcgcaagtatcagtagtggcggtaataccggctacgcagaattcgtaaagggccgattcaccatctcgagagacaacgccaagaagatggtgtatctgcaaatgaacagtgtgaaacctgaggacacaggcgtctattattgtaatatatatcgatcgcaagcaccgcctaccaaatactcttggggccaggggacccaggtcaccgtctcctca

SEQ ID NO: 4271 - DNA, 351 bp, synthetic construct
  source 1..351: mol_type = other DNA
gaggtgcagctggtggagtctgggggaggcttggtgcaggctggggggtctctgagactctcctgtgcagcctctggaataccactctatgccatgggttggtaccgccaggctccagggaagcagcgcgagttggtcgcaagtatcagtagtggcggtaatacacactatgcagaattcgtgaagggccgattcaccatctcgagagacaacgccaacaagatggtgtatctggaaatgagcagtgtgaaacctgaggacacaggcgtctattactgtaatatatatcgaccgcacgtacctactaccagatactcttggggccaggggacccaggtcaccgtctcctca

SEQ ID NO: 4272 - DNA, 357 bp, synthetic construct
  source 1..357: mol_type = other DNA
gaggtgcagctggtggagtctgggggaggcttggtgcaggctggggggtctctgagactctcctgtgcagcctctggaatgcccttcgctctcactgccatgggttggtaccgccaggctccggggaagcagcgcgagctggtcgcaagtatcagtagtggcggtaatacacactatgcagaattcgtgaagggccgattcaccatctcgagagacaacgccaacaagatgctgtttctgcaaatgagcagtgtgaaacctgaggacacaggcgtctattattgtaatatatatcgatcgcaaggacctactaccagatactcttggggccaggggacccaggtcaccgtctcctca

SEQ ID NO: 4273 - DNA, 357 bp, synthetic construct
  source 1..357: mol_type = other DNA
gaggtgcagctggtggagtctgggggaggcttggtgcagactggggggtctctgagactctcctgtgcagcctctggaatgttcttcgctcaaactgccatgggctggtaccgccaggctccagggaagcagcgcgagttggtcgcaagtatcagtagtggtagtaatacacgatatgcagaattcgtgaagggccggttcaccatctcgagagacaacgccaagaacacggtgtatctacaaatgaatagtgtgaaacctgaggacacaggcgtctattattgtaatatatatcgatctcaagcacctcctaccagatactcttggggccaggggacccaggtcaccgtctcctca

SEQ ID NO: 4274 - DNA, 357 bp, synthetic construct
  source 1..357: mol_type = other DNA
gaggtgcagctggtggagtctgggggaggcttggtgcaggctggggggtctctgagactctcctgtgcagcctctggaatacccttcgctctcactgccatgggttggtaccgccaggctccagggaagcagcgcgagttggtcgcaagtatcagtagtgccggtaatacacactatgcggaattcgtggagggccgattcaccatctcgagagacgtcgccaacaagatggtgtatctgcaaatgagcagtgtgaaacctgaggacacaggcgtctattattgtaatatatatcgaccgcaagtaccttctaccagatactcttggggccaggggacccaggtcaccgtctcctca

SEQ ID NO: 4275 - DNA, 357 bp, synthetic construct
  source 1..357: mol_type = other DNA
gaggtgcagctggtggagtctgggggaggcttggtgcaggctggggggtctctgagactctcctgtgcagcctctggaatacccttcgctctccctgccatgggttggtaccgccaggctccagggaaggagcgcgagttagtcgcaagtatcagtagtggcggcaatacaacatatgcagaattcacgaagggccgattcaccatctcgagagacgacgccaacaagatggtgtatctgcaaatgagcagtgtgaaacctgaggacacaggcgtctattattgtaatatatatcgatcgcgagtaccttctaccagatactcttggggccaggggacccaggtcaccgtctcctca

SEQ ID NO: 4276 - DNA, 357 bp, synthetic construct
  source 1..357: mol_type = other DNA
gaggtgcagctggtggagtctgggggaggcttggcgcaggctggggggtctctgagactctcctgtgcagcctctgggataccctcccctctccctgccgtgggttggtaccgccaggctccaggcgagcagcgcgagttggtcgcaagtatcagtagtggcggtaatacacgctatgcagaattcgtgaagggccgattcaccatctcgagagacaacgccaacaagatggtgtatctgcaaatgagcagtttgaaacctgaggacacaggcgtctattattgtaatatatatcgatcgcaagtaccttctaccagattcgcttggggccaggggacccaggtcaccgtctcctca

SEQ ID NO: 4277 - DNA, 351 bp, synthetic construct
  source 1..351: mol_type = other DNA
gaggtgcagctggtggagtctgggggaggcttggtgcaggctggggggtctctgagactctcctgtgcagcctctggaataccactctatgccatgggttggtaccgccaggctccagggaagcagcgcgagttggtcgcaagtatcagtagaggcggtaatacacactatgcagaattcgtgaagggccgattcaccatctcgagagacaacgccaacaagatggtgtatctggaaatgagcactgtgaaacctgaggacacaggcgtctattactgtaatatatatcgaccgcatgtacctactaccagatactcttggggccaggggacccaggtcaccgtctcctca

SEQ ID NO: 4278 - DNA, 351 bp, synthetic construct
  source 1..351: mol_type = other DNA
gaggtgcagctggtggagtctgggggaggcttggtgcaggctggggggtctctgagactctcctgtgcagcctctggaatgcccttcgttgccatgggctggtaccgccaggctccagggaagcagcgcgagttggtcgcaagtatcagtactggcggtaatacacactatgcagaattcgtggagggccgattcaccatctcgagagacaacgccaagaagatggtgtatctgcaaatgagcagtgtgaaacctgaggacacaggcgtctattattgtaatatatatcgatcggaagtaccgcctaccagatactcttggggccaggggacccaggtcaccgtctcctca

SEQ ID NO: 4279 - DNA, 351 bp, synthetic construct
  source 1..351: mol_type = other DNA
gaggtgcagctggtggagtctgggggaggcttggtgcaggctggggggtctctgagactctcctgtgcagcctctggaataccactcgttgccatgggttggtaccgccaggctccagggaagcagcgcgagttggtcgcaagtatcagcagtggcggtaatacacgctatgcagaatccgtgaagggccgattcaccatctcgagagacaacgccaacaagatggtgtatctgcaaatgagcagtgtgaaacctgaggacacaggcgtgtattattgtaatatatatcgatccgaagtacctcctaccagatactcttggggccaggggacccaggtcaccgtctcctca

SEQ ID NO: 4280 - DNA, 357 bp, synthetic construct
  source 1..357: mol_type = other DNA
gaggtgcagctggtggagtctgggggaggcttggtgcaacctgggggatctctaagactctcctgtgcagcctctggaatacccttcgctctccctgccatgggttggtaccgccaggctccagggaagcagcgcgagttggtcgcaagtatcggtagtgtcggtaatacacactatgcagaattcgtgaagggccgattcaccatctcgagagacaacgccaacaagatggtgtatctgcaaatgagcagtgtgaaacctgaggacacaggcgtctattattgcaatatatatcgatcgcaagtacctgttaccagatactcttggggccaggggacccaggtcaccgtctcctca

SEQ ID NO: 4281 - DNA, 357 bp, synthetic construct
  source 1..357: mol_type = other DNA
gaggtgcagctggtggagtctgggggaggcttggtgcaggctggggggtctctgagactctcctgtgcagcctctgggataccctcccctctccctgccatgggttggtaccgccaggctccagggaagcagcgcgagttggtcgcaagtatcagtagtgtcgataatacacgctatgcagaattcgtgaagggccgattcaccatctcgagagacaacgccaaccagatggtgtatctgcaaatgagcagtgtgaaacctgaggacacaggcgtctattattgtaatatatatcgatcgcaagtatcttctaccagatactcttggggccaggggacccaggtcaccgtctcctca

SEQ ID NO: 4282 - DNA, 357 bp, synthetic construct
  source 1..357: mol_type = other DNA
gaggtgcagctggtggagtctgggggaggcttggtgcaggctggggggtctctgagactctcctgtgcagcctctgggataccctcccctctccctgccatgggttggtaccgccaggctccagggaagcagcgcgagttggtcgcaagtatcagtagtgtcgataatacacgctatgcagaattcgtgaagggccgattcaccatctcgagagacaacgccaacaagatggtgtatctgcaaatgagcagtgtgaaacctgaggacacaggcgtctattattgtaatatatatcgatcgcaagtatcttctaccagatactcttggggccaggggacccaggtcaccgtctcctca

SEQ ID NO: 4283 - DNA, 351 bp, synthetic construct
  source 1..351: mol_type = other DNA
gaggtgcagctggtggagtctgggggaggcttggtgcaggctggggggtctctgagactctcctgtgcagcctctggaatgcccctcgttgccatgggctggtaccgccaggctccagggaagcagcgcgagttggtcgcaagtatcagtagtggcggtaatacaggctatgcagaattcgtgaagggccgattcaccatctcgagagacaacgccaagaagatggtgtatctgcaaatgaacagtgtgaaacctgaggacacaggcgtctattattgtaatatatatcgatcgcaagcaccgcctaccagatactcttggggccaggggacccaggtcaccgtctcctca

SEQ ID NO: 4284 - DNA, 357 bp, synthetic construct
  source 1..357: mol_type = other DNA
gaggtgcagctggtggagtctgggggaggcttggtgcaggctggggggtctctgagactctcctgtgcagcccctgggataccctcccctctccctgccatgggttggtaccgccaggctccggggaagcagcgcgagttggtcgcaagtatcagtagtgtcgatagtacacgctatgcagaattcgtgaagggccgattcaccatctcgagagacaacgccaacaagatggtgtatctgcaaatgagcagtgtgaaacctgaggacacaggcgtctattattgtaatatatatcgatcgcaagtatcttctaccagatactcttggggccaggggacccaggtcaccgtctcctca

SEQ ID NO: 4285 - DNA, 357 bp, synthetic construct
  source 1..357: mol_type = other DNA
gaggtgcagctggtggagtctgggggaggcttggtgcaggctggggggtctctgagactctcctgtgcagcctctggaatacccttcgctctccctgccatgggttggtaccgccaggctccagggaagcagcgcgagctggtcgcaagtatcggtagtggcggtgatacacgctatgcagaattcgtgaagggccgattcaccatctcgagagacaacgccaacaaggtggtgtatctgcaaatgagcagtgtgaaacctgaggacacaggcgtctattattgtaatatctatcgatcgcaaataccaactaccagatactcttggggccaggggacccaggtcaccgtctcctca

SEQ ID NO: 4286 - DNA, 351 bp, synthetic construct
  source 1..351: mol_type = other DNA
gaggtgcagctggtggagtctgggggaggcttggtgcaggctggggggtctctgagactctcctgtgcagcctctggaataccactctatgccatgggttggtaccgccaggctccagggaagcagcgcgagttggtcgcaagtatcagtagtggcggtaatacacactatgcagaattcgtgaagggccgattcaccatctcgagagacaacgccaacaagatggtgtatctggaaatgcgcagtgtgaaacctgaggacacaggcgtctattactgtaatatatatcgaccgcgagtacctactaccagatactcttggggccaggggacccaggtcaccgtctcctca

SEQ ID NO: 4287 - DNA, 357 bp, synthetic construct
  source 1..357: mol_type = other DNA
gaggtgcagctggtggagtctgggggaggcttggtgcaggctggggggtctctgagactctcctgtgcagcctctggaatacccttcgctctcgctgccatgggttggtaccgccaggctccagggaagcagcgcgagttggtcgcaagtataagtagtggcggtaatacacgctatgcagaattcgtgaagggccgattcaccatctcgagagacaacgcaaacaagatggtgtatctgcaaatgagcagtgtgaaacctgaggacacaggcgtatattattgtaatatatatcgatcgaaagtaccttctaccagatactcttggggccaggggacccaggtcaccgtctcctca

SEQ ID NO: 4288 - DNA, 351 bp, synthetic construct
  source 1..351: mol_type = other DNA
gaggtgcagctggtggagtctgggggaggcttagtgcaggctggggggtctctgagactctcctgtgcagcctctggaatgcccttcgttgccatgggctggtaccgccaggctccagggaagcagcgcgagttggtcgcaagtatcagtagtggcggtaatacacactatgcagaattcgtgaagggccgattcaccatctcgagagacaacgccaagaagatggtgtatctgcaaatgagcagtgtgaaacctgaggacacaggcgtctattattgtaatatatatcgatcgcaaatatcgcctaccagatactcttggggccaggggacccaggtcaccgtctcctca

SEQ ID NO: 4289 - DNA, 357 bp, synthetic construct
  source 1..357: mol_type = other DNA
gaggtgcagctggtggagtctgggggaggcttggtgcaggctggggggtctctgagactctcctgtgcagtgtctgggataccctcccctctccctgccatgggttggtaccgccaggctccagggaagcagcgcgagttggtcgcaagcatcagtagtggcggtaatacacgctatgcagaattcgtgaagggccgattcaccatctcgagagacaacgccaacaagatggtgtatctgcaaatgagcagtgtgaaacctgaggacacaggcgtctattattgtaatatatatcgatcgcaaagaccttctaccagatactcttggggccaggggacccaggtcaccgtctcctca

SEQ ID NO: 4290 - DNA, 351 bp, synthetic construct
  source 1..351: mol_type = other DNA
gaggtgcagctggtggagtctgggggaggcttagtgcaggctggggggtctctgagactctcctgtgcagcctctggaatgcccttcgttgccatgggctggtaccgccaggctccagggaagcagcgcgagttggtcgcaagtatcagtagtggcggtaatacacactatgcagaattcgtgaagggccgattcaccatctcgagagacaacgccaagaagatggtgtatctgcaagtgagcagtgtgaaacctgaggacacaggcgtctattattgtaatatatatcgatcgcaaatatcgcctaccagatactcttggggccaggggacccaggtcaccgtctcctca

SEQ ID NO: 4291 - DNA, 357 bp, synthetic construct
  source 1..357: mol_type = other DNA
gaggtgcagctggtggagtctgggggaggcttggtgcaggctggggggtctctgagactctcctgtgcagcctctggaatacccttcgctctccctgccatgggttggtaccgccaggctccagggaagcagcgcgaggtggtcgcaagtatcagtagtggcggcgatacacactatgcagaattcgtgaagggccgattcaccatctcgagagacaacgccaacaagatggtgtatctgcaaatgagcagtgtgaaacctgaggacacaggcgtctattattgtaatatatatcgatcgcatgtaccaactaccagatactcttggggccaggggacccaggtcaccgtctcctca

SEQ ID NO: 4292 - DNA, 357 bp, synthetic construct
  source 1..357: mol_type = other DNA
gaggtgcagctggtggagtctgggggaggcttggtgcaggctggggggtctctgagactctcctgtgcagcctctgggataccctcccctctccctgccatgggttggtaccgccaggctccaggcgagcagcgcgagttggtcgcaagtatcagtagtggcggtaatacacgctatgcagaattcgtgaagggccgattcaccatctcgagagacaacgccaacaagatggtgtatctgcaaatgagcagtttgaaacctgaggacacaggcgtctattattgtaatatatatcgatcgcaagtaccttctaccagattcgcttggggcccggggacccaggtcaccgtctcctca

SEQ ID NO: 4293 - DNA, 357 bp, synthetic construct
  source 1..357: mol_type = other DNA
gaggtgcagctggtggagtctgggggaggcttggtgcaggctggggggtctctgagactctcctgtgcaacctctggaatacccttcgctctccctgccatgggttggtaccgccaggctccagggaagcagcgcgagttagtcgcaagtatcagtagtggcggcaatacaaattatgcagaattcacgaagggccgattcaccatctcgagagacaacgccaacaagatggtgtatctgcaaatgagcagtgtggaacctgaggacacaggcgtctattattgtaatatatatcgatcgggagtaccttctaccagatactcttggggccaggggacgcaggtcaccgtctcctca

SEQ ID NO: 4294 - DNA, 351 bp, synthetic construct
  source 1..351: mol_type = other DNA
gaggtgcagctggtggagtctgggggaggcttggtgcaggctggggggtctctgagactctcctgtgcagcctctggaatgcccctcactgccatgggttggtaccgccaggctccggggaagcagcgcgagttggtcgcaagtatcagtagtggcggtaatacacgctatgcagaattcgtgaagggccgattcaccatctcgagagacaacgccaacaagatggtgtttctgcaaatgagcagtgtgaaacctgaggacacaggcgtctattattgtaatatatatcgaccgcaagtccctcttaccagatactcttggggccaggggacccaggtcaccgtctcctca

SEQ ID NO: 4295 - DNA, 357 bp, synthetic construct
  source 1..357: mol_type = other DNA
gaggtgcagctggtggagtctgggggaggcttggtgcagactggggggtctctgagactctcctgtgcagcctctggaatgttcctcgctctcactgccatgggctggtaccgccaggctccagggaaacagcgcgagttggtcgcaagtatcagtagtagtagtgatacacgatatgcagaattcgtgaagggccggttcaccatctcgagagacaacgccaagaacacggtgtatctacaaatgaatagtgtgaaacctgaggacacaggcgtctattattgtaatatatatcgatccaaagtacctcctaccaggtattcttggggccaggggacccaggtcaccgtctcctca

SEQ ID NO: 4296 - DNA, 351 bp, synthetic construct
  source 1..351: mol_type = other DNA
gaggtgcagctggtggagtctgggggaggcttggtgcaggctggggggtctctgagactctcctgtgcagcctctggaataccactctatgccatgggttggtaccgccaggctccagggaagcagcgcgagttggtcgcaagtatcagtagtggcggtaatacacactatgcagaattcgtgaagggccgattcaccatctcgagagacaacgccaacaagatggtgtatctggaaatgagcagtgtgaaacctgaggacacaggcgtctattactgtaatatatatcgaccgaaagtacctactaccagatactcttggggccaggggacccaggtcaccgtctcctca

SEQ ID NO: 4297 - DNA, 351 bp, synthetic construct
  source 1..351: mol_type = other DNA
gaggtgcagctggtggagtctgggggaggcttggtgcaggctggggggtctctgagactctcctgtgcagcctctggaataccactctatgccatgggttggtaccgccaggctccagggaagcagcgcgagttggtcgcaagtatcagtagtggcggtaatacacactatgcagaattcgtgaagggccgattcaccatctcgagagacaacgccaacaagatggtgtatctggaaatgagcagtgtgaaacctgaggacacaggcgtctattactgtaatatatatcgaccgcaagtaccttctaccagatactcttggggccaggggacccaggtcaccgtctcctca

SEQ ID NO: 4298 - DNA, 357 bp, synthetic construct
  source 1..357: mol_type = other DNA
gaggtgcagctggtggagtctgggggaggcttggtgcaggctggggggtctctgagactctcctgtgcagcctctggaatacccttcgctctcactgccatgggttggtaccgccaggctccagggaagcagcgcgagttggtcgcaagtatcagtagtgccggtaatacacactatgcggaattcgtggagggccgattcaccatctcgagagacgtcgccaacaagatggtgtatctgcaaatgagcagtgtgaaacctgaggacacaggcgtctattattgtaatatatatcgatcgcaagtaccttctaccagatactcttggggccaggggacccaggtcaccgtctcctca

SEQ ID NO: 4299 - DNA, 351 bp, synthetic construct
  source 1..351: mol_type = other DNA
gaggtgcagctggtggagtctgggggaggcttggtgcaggctggggggtctctgagactctcctgtgcagcctctggaatgcccttggttgccatgggctggtaccgccaggctccagggaagcagcgcgagttggtcgcaagtatcagtagtggcggtaatacagactatgcagaattcgtgaagggccgattcaccatctcgagagacaacgccaagaagatggtgtatctgcaaatgaacagtgtgaaacctgaggacacaggcgtctattattgtaatatatatcgaccgcaagtaccgcctaccagatactcttggggccaggggacccaggtcaccgtctcctca

SEQ ID NO: 4300 - DNA, 357 bp, synthetic construct
  source 1..357: mol_type = other DNA
gaggtgcagctggtggagtctgggggaggcttggtgcaggctggggggtctctgagactctcctgtgcagcctctgggataccctcccctctccctgccatgggttggtaccgccaggctccagggaagcagcgcgagttggtcgcgagtatcagtagtgccggtaatacacactatgcagaattcgtggagggccgattcaccatctcaagagacaacgccaacaagatggtgtatctgcaaatgagcagtgtgggacctgaggacacaggcgtctattattgtaatatatttcgatcgcaaatacctactaccagatactcttggggccaggggacccaggtcaccgtctcctca

SEQ ID NO: 4301 - DNA, 357 bp, synthetic construct
  source 1..357: mol_type = other DNA
gaggtgcagctggtggagtctgggggaggcttggtgcaggctggggggtctctgacgctctcctgtgcaacgtctggactgttcttcgctcagactgccatgggctggtaccgccaggcgccagggaagcagcgcgagttggtcgcaagtatcagtagtagtggtcagacacgctatgcagaagccgtgaagggccgattcagcgtctcgagagacaacgccgagaacacggtgtatctgcaaatgagaagtgtggaacctgaggacacaggcgtctattattgtaatatatatcgaccgcaagtacctctaaccagatactcttggggccaggggacccaggtcaccgtctcctca

SEQ ID NO: 4302 - DNA, 357 bp, synthetic construct
  source 1..357: mol_type = other DNA
gaggtgcagctggtggagtctgggggaggcttggtgcaggctggggggtctctgagactctcctgtgcagcccatgggataccctcccctctccctgccatgggttggtaccgccaggctccagggaagcagcgcgagttggtcgcaagtatcagtagtgccggtaatacacactatgcagaattcgtgaagggccgattcaccatctcgagagacaacgccaacaagatggtgtatctgcaaatgagcagtgtgaaacctgaggacacaggcgtctattattgtaatatatatcgatcgcaagtaccgtatactagatactcttggggccaggggacccaggtcaccgtctcctca

SEQ ID NO: 4303 - DNA, 357 bp, synthetic construct
  source 1..357: mol_type = other DNA
gaggtgcagctggtggagtctgggggaggcttggtgcaggctggggggtctctgagactctcctgtgcagcctctggaatacccttcgctctccctgccatgggttggtaccgccaggctccagggaagcagcgcgagttggtcgcaagtatcagtagtggcggtaatacagcatatgcagaattcgtgaagggccgattcaccatctcgagagacgacgccaacaagatggtgtatctgcacatgagcagtgtgaaacctgaggacacaggcgtctattattgtaatatatatcgatcgcaagtacctgttaccagatactcttggggccaggggacccaggtcaccgtctcctca

SEQ ID NO: 4304 - DNA, 351 bp, synthetic construct
  source 1..351: mol_type = other DNA
gaggtgcagctggtggagtctgggggaggcttggtgcaggctggggggtctctgagactctcctgtgcagcctctggaatgcccttggttgccatgggctggtaccgccaggctccagggaagcagcgcgagttggtcgcaagtatcagtagtggcggtaatacaggctatgcagaattcgtgaagggccgattcaccatctcgagagacaacgccaagaagatggtgtatctgcaaatgaacagtgtgaaacctgaggacacaagcgtctattattgtaatatatatcgatcgcaagcatcgcctactagatactcttggggccaggggacccaggtcaccgtctcctca

SEQ ID NO: 4305 - DNA, 357 bp, synthetic construct
  source 1..357: mol_type = other DNA
gaggtgcagctggtggagtctgggggaggcttggtgcaggctggggggtctctgagactctcctgtgcagcctctggaatacccttcgctctccctgccatgggttggtaccgccaggctccagggaagcagcgcgagttagtcgcaagtatcagtagtggcggtaatacaacatatgcagaattcacgaagggccgattcaccatctcgagagacaacgccaacaagatggtgtatctgcaaatgagcagtgtgaaacctgaggacacaggcgtctattattgtaatatatatcgatcgcgagtacctactaccagatactcttggggccaggggacccaggtcaccgtctcctca

SEQ ID NO: 4306 - DNA, 357 bp, synthetic construct
  source 1..357: mol_type = other DNA
gaggtgcagctggtggagtctgggggaggcttggtgcaggctggggggtctctgagactctcctgtgcagcctctggaatacccttcgctctccctgccatgggttggtaccggcaggctccagggaagcagcgcgagttggtcgcaagtatcagtagtggcggtaatacaacctatggagacttcgtgaagggccgattcaccatctcgagagacgacgccaacaagatgttgtttctgcaaatgagcagtgtgaaacctgaggacacaggcgtctattattgtaatatatatcgatcgcgagtacctactaccagatactcttggggccaggggacccaggtcaccgtctcctca

SEQ ID NO: 4307 - DNA, 357 bp, synthetic construct
  source 1..357: mol_type = other DNA
gaggtgcagctggtggagtctgggggaggcttggtgcaggctggggggtctctaagactctcctgtgcagcctctggaatacccttcgctctccctgccatgggttggtaccgccagggtccagggaagcagcgcgagttagtcgcaagtatcagtcctggcggtaatacgagctatgcagaattcacgaagggccgattcaccatctcgagagacaacgccaacaagatggtgtatctgcaaatgagcagtgtgaaacctgaggacacaggcgtctattattgtaatatatatcgatcgcgagtaccttctaccagatactcttggggccaggggacccaggtcaccgtctcctca

SEQ ID NO: 4308 - DNA, 351 bp, synthetic construct
  source 1..351: mol_type = other DNA
gaggtgcagctggtggagtctgggggaggcttggtgcaggcggggggatctctgagactctcctgtgcagcctctggaataccactcgttgccatgggttggtaccgccaggctccagggaagcagcacgagttggtcgcaagtatcagtagtggcggtaatacacgctatgcagaattcgtgaagggccgattcaccatctcgagagacaacgccaacaagatggtgtatctgcaaatgagcagtgtgaaacctgaggacacaggcgtctattattgtaatatatatcgatctgaagtaccttctaccagatactcttggggccaggggacccaggtcaccgtctcctca

SEQ ID NO: 4309 - DNA, 402 bp, synthetic construct; identical to SEQ ID NO: 2257
  source 1..402: mol_type = other DNA

SEQ ID NO: 4310 - DNA, 402 bp, synthetic construct; identical to SEQ ID NO: 2258
  source 1..402: mol_type = other DNA

SEQ ID NO: 4311 - protein, 27 aa, synthetic construct
AAKRLGPIVHQYSLEVLTPLFLDEYDY

SEQ ID NO: 4312 - protein, 27 aa, synthetic construct
AAKRLGPIVHRYSLEVLTPLFLDEYDY

SEQ ID NO: 4313 - protein, 27 aa, synthetic construct
AAKRLGPAVHQYSLEVLTPLFLDEYDY

SEQ ID NO: 4314 - protein, 27 aa, synthetic construct
AAKRLGPAVHRYSLEVLTPLFLDEYDY

SEQ ID NO: 4315 - protein, 27 aa, synthetic construct
AAKRLGPLVHQYSLEVLTPLFLDEYDY

SEQ ID NO: 4316 - protein, 27 aa, synthetic construct
AAKRLGPLVHRYSLEVLTPLFLDEYDY

SEQ ID NO: 4317 - protein, 134 aa, synthetic construct
EVQLLESGGGLVQPGGSLRLSCAASGFTLDYYAIGWFRQAPGKEREGVLSISSTDGRTYYADSVKGRFTISRDNPKNTVYLQLNSLRPEDTAVYYCAAKRLGPIVHQYSLEVLTPLFLDEYDYWGQGTQVTVSS

SEQ ID NO: 4318 - protein, 134 aa, synthetic construct
EVQLLESGGGLVQPGGSLRLSCAASGFTLDYYAIGWFRQAPGKEREGVLSISSTDGRTYYADSVKGRFTISRDNPKNTVYLQLNSLRPEDTAVYYCAAKRLGPIVHRYSLEVLTPLFLDEYDYWGQGTQVTVSS

SEQ ID NO: 4319 - protein, 134 aa, synthetic construct
EVQLLESGGGLVQPGGSLRLSCAASGFTLDYYAIGWFRQAPGKEREGVLSISSTDGRTYYADSVKGRFTISRDNPKNTVYLQLNSLRPEDTAVYYCAAKRLGPAVHQYSLEVLTPLFLDEYDYWGQGTQVTVSS

SEQ ID NO: 4320 - protein, 134 aa, synthetic construct
EVQLLESGGGLVQPGGSLRLSCAASGFTLDYYAIGWFRQAPGKEREGVLSISSTDGRTYYADSVKGRFTISRDNPKNTVYLQLNSLRPEDTAVYYCAAKRLGPAVHRYSLEVLTPLFLDEYDYWGQGTQVTVSS

SEQ ID NO: 4321 - protein, 134 aa, synthetic construct
EVQLLESGGGLVQPGGSLRLSCAASGFTLDYYAIGWFRQAPGKEREGVLSISSTDGRTYYADSVKGRFTISRDNPKNTVYLQLNSLRPEDTAVYYCAAKRLGPLVHQYSLEVLTPLFLDEYDYWGQGTQVTVSS

SEQ ID NO: 4322 - protein, 134 aa, synthetic construct
EVQLLESGGGLVQPGGSLRLSCAASGFTLDYYAIGWFRQAPGKEREGVLSISSTDGRTYYADSVKGRFTISRDNPKNTVYLQLNSLRPEDTAVYYCAAKRLGPLVHRYSLEVLTPLFLDEYDYWGQGTQVTVSS

SEQ ID NO: 4323 - protein, 27 aa, synthetic construct
  VARIANT 8: note = M, I, A or L
  VARIANT 11: note = Q or R
AAKRLGPXVHXYSLEVLTPLFLDEYDY

SEQ ID NO: 4324 - protein, 10 aa, synthetic construct
HHHHHHHHHH

SEQ ID NO: 4325 - protein, 6 aa, synthetic construct
HHHHHH

SEQ ID NO: 4326 - protein, 4 aa, synthetic construct
VAGG

SEQ ID NO: 4327 - protein, 4 aa, synthetic construct
VPAG

SEQ ID NO: 4328 - protein, 226 aa, synthetic construct
DKTHTCPPCPAPEGSRGPSVFLFPPKPKDTLMISRTPEVTCVVVDVSHEDPEVKFNWYVDGVEVHNAKTKPREEQYNSTYRVVSVLTVLHQDWLNGKEYKCKVSNKALPAPIEKTISKAKGQPREPQVYTLPPSREEMTKNQVSLTCLVKGFYPSDIAVEWESNGQPENNYKTTPPVLDSDGSFFLYSKLTVDKSRWQQGNVFSCSVMHEALHNHYTQKSLSLSPG

SEQ ID NO: 4329 - protein, 226 aa, synthetic construct
DKTHTCPPCPAPESTRGPSVFLFPPKPKDTLMISRTPEVTCVVVDVSHEDPEVKFNWYVDGVEVHNAKTKPREEQYNSTYRVVSVLTVLHQDWLNGKEYKCKVSNKALPAPIEKTISKAKGQPREPQVYTLPPSREEMTKNQVSLTCLVKGFYPSDIAVEWESNGQPENNYKTTPPVLDSDGSFFLYSKLTVDKSRWQQGNVFSCSVMHEALHNHYTQKSLSLSPG

SEQ ID NO: 4330 - protein, 226 aa, synthetic construct
DKTHTCPPCPAPESVRGPSVFLFPPKPKDTLMISRTPEVTCVVVDVSHEDPEVKFNWYVDGVEVHNAKTKPREEQYNSTYRVVSVLTVLHQDWLNGKEYKCKVSNKALPAPIEKTISKAKGQPREPQVYTLPPSREEMTKNQVSLTCLVKGFYPSDIAVEWESNGQPENNYKTTPPVLDSDGSFFLYSKLTVDKSRWQQGNVFSCSVMHEALHNHYTQKSLSLSPG

SEQ ID NO: 4331 - protein, 226 aa, synthetic construct
DKTHTCPPCPAPETQRGPSVFLFPPKPKDTLMISRTPEVTCVVVDVSHEDPEVKFNWYVDGVEVHNAKTKPREEQYNSTYRVVSVLTVLHQDWLNGKEYKCKVSNKALPAPIEKTISKAKGQPREPQVYTLPPSREEMTKNQVSLTCLVKGFYPSDIAVEWESNGQPENNYKTTPPVLDSDGSFFLYSKLTVDKSRWQQGNVFSCSVMHEALHNHYTQKSLSLSPG

SEQ ID NO: 4332 - protein, 226 aa, synthetic construct
DKTHTCPPCPAPETTRGPSVFLFPPKPKDTLMISRTPEVTCVVVDVSHEDPEVKFNWYVDGVEVHNAKTKPREEQYNSTYRVVSVLTVLHQDWLNGKEYKCKVSNKALPAPIEKTISKAKGQPREPQVYTLPPSREEMTKNQVSLTCLVKGFYPSDIAVEWESNGQPENNYKTTPPVLDSDGSFFLYSKLTVDKSRWQQGNVFSCSVMHEALHNHYTQKSLSLSPG

SEQ ID NO: 4333 - protein, 226 aa, synthetic construct
DKTHTCPPCPAPEAAGGPSVFLFPPKPKDTLMISRTPEVTCVVVDVSHEDPEVKFNWYVDGVEVHNAKTKPREEQYNSTYRVVSVLTVLHQDWLNGKEYKCKVSNKALGAPIEKTISKAKGQPREPQVYTLPPSREEMTKNQVSLTCLVKGFYPSDIAVEWESNGQPENNYKTTPPVLDSDGSFFLYSKLTVDKSRWQQGNVFSCSVMHEALHNHYTQKSLSLSPG

SEQ ID NO: 4334 - protein, 226 aa, synthetic construct
DKTHTCPPCPAPELLGGPSVFLFPPKPKDTLYITREPEVTCVVVDVSHEDPEVKFNWYVDGVEVHNAKTKPREEQYNSTYRVVSVLTVLHQDWLNGKEYKCKVSNKALPAPIEKTISKAKGQPREPQVYTLPPSREEMTKNQVSLTCLVKGFYPSDIAVEWESNGQPENNYKTTPPVLDSDGSFFLYSKLTVDKSRWQQGNVFSCSVMHEALHNHYTQKSLSLSPG

SEQ ID NO: 4335 - protein, 8 aa, synthetic construct
IYSDSSGT

SEQ ID NO: 4336 - protein, 15 aa, synthetic construct
VKGRGSGSYYPFDDY

SEQ ID NO: 4337 - protein, 122 aa, synthetic construct
EVQLVESGGGLAQPGGSLRLSCAASGFTFSNYAMSWARQAPGKGLEWVSGIYSDSSGTYYADSVKGRFTISRDNAKNTVYLQMNSLKPEDTALYYCVKGRGSGSYYPFDDYWGQGTQVTVSS

SEQ ID NO: 4338 - DNA, 366 bp, synthetic construct
  source 1..366: mol_type = other DNA
gaggtgcagctggtggagtctgggggaggcttggcgcagcctggggggtctctgagactctcctgtgcagcctctggattcaccttcagtaactatgccatgagctgggcccgccaggctccaggaaaggggctcgagtgggtgtccggtatttatagtgatagtagtggcacatactatgcagactccgtgaagggccgattcaccatctccagagacaacgccaagaacacggtgtatctgcaaatgaacagcctgaaacctgaggacacggcactgtattactgtgtaaagggtcgagggagtggtagttactacccctttgatgactactggggccaggggacccaggtcaccgtctcctca

SEQ ID NO: 4339 - protein, 122 aa, synthetic construct
EVQLLESGGGLAQPGGSLRLSCAASGFTFSNYAMSWARQAPGKGLEWVSGIYSDSSGTYYADSVKGRFTISRDNAKNTVYLQMNSLRPEDTAVYYCVKGRGSGSYYPFDDYWGQGTQVTVSS

SEQ ID NO: 4340 - protein, 15 aa, synthetic construct
  VARIANT 1: note = A or V
  VARIANT 5: note = G, H or N
  VARIANT 12: note = W or F
  VARIANT 14: note = D or E
XKGRXSGSYYPXDXY

SEQ ID NO: 4341 - protein, 8 aa, synthetic construct
  VARIANT 5: note = G or S
IYSDXSGT

SEQ ID NO: 4342 - protein, 122 aa, synthetic construct
EVQLVESGGGLAQPGGSLRLSCAASGFTFSYYAMSWARQAPGKGLEWVAGIYSDGSGTYYADSVKGRFTISRDNAKNTVYLQMNSLKPEDTALYYCAKGARSGSYYPWDDYWGQGTQVTVSS

SEQ ID NO: 4343 - protein, 122 aa, synthetic construct
EVQLVESGGGLAQPGGSLRLSCAASGFTFSNYAMSWARQAPGKGLEWVSGIYSDGSGTYYADSVKGRFTISRDNAKNTVYLQMNSLKPEDTGLYYCAKGARSGSYYPWDDYWGQGTQVTVSS

SEQ ID NO: 4344 - protein, 122 aa, synthetic construct
EVQLVESGGGLAQPGGSLRLSCAASGFTFSNYAMSWARQAPGKGLEWVSGIYSDGSGTYYADSVKGRFTISRDNAKNTVYLQMSSLKPEDTALYYCAKGARSGSYYPWDDVWGQGTQVTVSS

SEQ ID NO: 4345 - protein, 122 aa, synthetic construct
EVQLVESGGGLVQPGGSLRLSCAASGFTFSNYAMSWARQAPGKGLEWVSGIYSDGSGTYYADSVKGRFTISRDNAKNTVYLQMSSLKPEDTALYYCAKGAGSGSYYPWDDVWGQGTQVTVSS

SEQ ID NO: 4346 - protein, 122 aa, synthetic construct
EVQLVESGGGLAQPGGSLRLSCAASGFTFSNYAMSWARQAPGKGLEWVSGIYSDGSGTYYADSVKGRFTISRDNAKNTVYLQMSSLKPEDTALYYCAKGAGSGSYYPWDDVWGQGTQVTVSS

SEQ ID NO: 4347 - protein, 122 aa, synthetic construct
EVQLVESGGGLAQPGGSLRLSCAASGFTFSNYAMSWARQAPGKGLEWVSGIYSDGSGTYYADSVKGRFTISRDNAKNTVYLQMSSLKPEDTALYYCAKGARSGSYDPWDDVWGQGTQVTVSS

SEQ ID NO: 4348 - protein, 122 aa, synthetic construct
EVQLVESGGGLAQPGGSLRLSCAASGFTFSNYAMSWARQAPGKGLEWVSGIYSDGSGTYYADSVKGRFTISRDNAKNTVYLQMSSLKPEDTALYYCSKGARSGSYYPWDDVWGQGTQVTVSS

SEQ ID NO: 4349 - protein, 122 aa, synthetic construct
EVQLVESGGGLAQPGGSLRLSCAASGFTFSNYAMSWARQAPGKGLEWVSGIYSDGSGTYYADSVKGRFTISRDNAKNTVYLQMSSLKPEDTALYYCAKGASSGSYYPWDDVWGQGTQVTVSS

SEQ ID NO: 4350 - protein, 122 aa, synthetic construct
EVQLVESGGGLAQPGGSLRLSCAASGFTFSNYAMSWARQAPGKGLEWVSGIYSDGSGTYYADSVKGRFTISRDNAKNTVYLQMSSLKPEDTALYYCAKGARSGSYYPWDGVWGQGTQVTVSS

SEQ ID NO: 4351 - protein, 122 aa, synthetic construct
EVQLVESGGGLAQPGGSLRLSCAASGFTFSNYAMSWARQAPGKGLEWVSGIYSDGSGTYYADSVKGRFTISRDNAKNTVYLQMSSLKPEDTALYYCAQGARSGSYYPWDDVWGQGTQVTVSS

SEQ ID NO: 4352 - protein, 122 aa, synthetic construct
EVQLVESGGGLAQPGGSLRLSCAASGFTFSNYAMSWARQAPGKGLEWVSGIYSDGSGTYYADSVKGRFTISRDNAKNTVYLQMSSLKPEDTALYYCATGARSGSYYPWDDVWGQGTQVTVSS

SEQ ID NO: 4353 - protein, 122 aa, synthetic construct
EVQLVESGGGLAQPGGSLRLSCAASGFTFSNYAMSWARQAPGKGLEWVSGIYSDGSGTYYADSVKGRFTISRDNAKNTVYLQMSSLKPEDTALYYCAKGDRSGSYYPWDDVWGQGTQVTVSS

SEQ ID NO: 4354 - protein, 122 aa, synthetic construct
EVQLVESGGGLAQPGGSLRLSCAASGFTFSNYAMSWARQAPGKGLEWVSGIYSDGSGTYYADSVKGRFTISRDNAKNTVYLQMSSLKPEDTALYYCAKGSRSGSYYPWDDVWGQGTQVTVSS

SEQ ID NO: 4355 - protein, 122 aa, synthetic construct
EVQLVESGGGLAQPGGSLRLSCAASGFTFSNYAMSWARQAPGKGLEWVSGIYSDGSGTYYADSVKGRFTISRDNAKNTVYLQMSSLKPEDTALYYCAKGARSGSYYPWDNVWGQGTQVTVSS

SEQ ID NO: 4356 - protein, 122 aa, synthetic construct
EVQLVESGGGLAQPGGSLRLSCAASGFTFSNYAMSWARQAPGKGLEWVSGIYSDGSGTYYADSVKGRFTISRDNAKNTVYLQMSSLKPEDTALYYCAKGARRGSYYPWDDVWGQGTQVTVSS

SEQ ID NO: 4357 - protein, 122 aa, synthetic construct
EVQLVESGGGLAQPGGSLRLSCAASGFTFSNYAMSWARQAPGKGLEWVSGIYSDGSGTYYADSVKGRFTISRDNAKNTVYLQMSSLKPEDTALYYCVKGARSGSYYPWDDVWGQGTQVTVSS

SEQ ID NO: 4358 - protein, 122 aa, synthetic construct
EVQLVESGGGLAQPGGSLRLSCAASGFTFSNYAMSWARQAPGKGLEWVSGIYSDGSGTYYADSVKGRFTISRDNAKNTVYLQMSSLKPEDTALYYCAKGARSGSYYPWYDVWGQGTQVTVSS

SEQ ID NO: 4359 - protein, 122 aa, synthetic construct
EVQLVESGGGLAQPGGSLRLSCAASGFTFSNYAMSWARQAPGKGLEWVSGIYSDGSGTYYADSVKGRFTISRDNAKNTVYLQMSSLKPEDTALYYCTKGARSGSYYPWDDVWGQGTQVTVSS

SEQ ID NO: 4360 - protein, 122 aa, synthetic construct
EVQLVESGGGLAQPGGSLRLSCAASGFTFSNYAMSWARQAPGKGLEWVSGIYSDGSGTYYADSVKGRFTISRDNAKNTVYLQMSSLKPEDTALYYCAKGARSGIYYPWDDVWGQGTQVTVSS

SEQ ID NO: 4361 - protein, 122 aa, synthetic construct
EVQLVESGGGLAQPGGSLRLSCAASGFTFSNYAMSWARQAPGKGLEWVSGIYSDGSGTYYADSVKGRFTISRDNAKNTVYLQMSSLKPEDTALYYCAKGARSGSDYPWDDVWGQGTQVTVSS

SEQ ID NO: 4362 - protein, 122 aa, synthetic construct
EVQLVESGGGLAQPGGSLRLSCAASGFTFSNYAMSWARQAPGKGLEWVSGIYSDGSGTYYADSVKGRFTISRDNAKNTVYLQMSSLKPEDTALYYCAKGARSGSYYPWDVVWGQGTQVTVSS

SEQ ID NO: 4363 - protein, 122 aa, synthetic construct
EVQLVESGGGLAQPGGSLRLSCAASGFTFSNYAMSWARQAPGKGLEWVSGIYSDGSGTYYADSVKGRFTISRDNAKNTVYLQMSSLKPEDTALYYCAKGARGGSYYPWDDVWGQGTQVTVSS

SEQ ID NO: 4364 - protein, 122 aa, synthetic construct
EVQLVESGGGLAQPGGSLRLSCAASGFTFSNYAMSWARQAPGKGLEWVSGIYSDGSGTYYADSVKGRFTISRDNAKTTVYLQMSSLKPEDTALYYCAKGARSGSYDPWDDVWGQGTQVTVSS

SEQ ID NO: 4365 - protein, 122 aa, synthetic construct
EVQLVESGGGLAQPGGSLRLSCAASGFTFSNYAMSWARQAPGKGLEWVSGIYSDGSGTYYADSVKGRFTISRDNAKNTVYLQMSSLKPEDTALYYCAKGARSGRYYPWDDVWGQGTQVTVSS

SEQ ID NO: 4366 - protein, 122 aa, synthetic construct
EVQLVESGGGLAQPGGSLRLSCAASGFTFSNYAMSWARQAPGKGLEWVSGIYSDGSGTYYADSVKGRFTISRDNAKNTVYLQMSSLKPEDTALYYCEKGARSGSYYPWDDVWGQGTQVTVSS

SEQ ID NO: 4367 - protein, 122 aa, synthetic construct
EVQLVESGGGLAQPGGSLRLSCAASGFTFSNYAMSWARQAPGKGLEWVSGIYSDGSGTYYADSVKGRFTISRDTAKNTVYLQMSSLKPEDTALYYCAKGARSGSYDPWDDVWGQGTQVTVSS

SEQ ID NO: 4368 - protein, 122 aa, synthetic construct
EVQLVESGGGLAQPGGSLRLSCAASGFTFSNYAMSWARQAPGKGLEWVSGIYSDGSGTYYADSVKGRFTISRDNAKNTVYLQMSSLKPEDTALYYCAMGARSGSYYPWDDVWGQGTQVTVSS

SEQ ID NO: 4369 - protein, 122 aa, synthetic construct
EVQLVESGGGLAQPGGSLRLSCAASGFTFSDYAMSWARQAPGKGLEWVSGIYSDGSGTYYADSVKGRFTISRDNAKNTVYLQMSSLKPEDTALYYCAKGVRSGSYYPWDDVWGQGTQVTVSS

SEQ ID NO: 4370 - protein, 122 aa, synthetic construct
EVQLVESGGGLAQPGGSLRLSCAASGFTFSNYAMSWARQAPGKGLEWVSGIYSDGSGTYYADSVKGRFTISRDNAKNTVYLQMSSLKPEDTALYYCAKGARSGSYYPLDDVWGQGTQVTVSS

SEQ ID NO: 4371 - protein, 122 aa, synthetic construct
EVQLVESGGGLAQPGGSLRLSCAASGFTFSNYAMSWARQAPGKGLEWVSGIYSDGSGTYYADSVKGRFTISRDNAKNTVYLQMSSLKPEDTALYYCAKGARSGSSYPWDDVWGQGTQVTVSS

SEQ ID NO: 4372 - protein, 122 aa, synthetic construct
EVQLVESGGGLAQPGGSLRLSCAASGFTFSNYAMSWARQAPGKGLEWVSGIYSDGSGTYYADSVKGRFTISRDNAKNTVYLQMSSLKPEDTALYYCAKVARSGSYYPWDDVWGQGTQVTVSS

SEQ ID NO: 4373 - protein, 122 aa, synthetic construct
EVQLVESGGGLAQPGGSLRLSCAASGFTFSNYAMSWARQAPGKGLEWVSGIYSDGSGTYYADSVKGRFTISRDNAKNTVYLQMSSLKPEDTALYYCAKGARSGSYYHWDDVWGQGTQVTVSS

SEQ ID NO: 4374 - protein, 122 aa, synthetic construct
EVQLVESGGGLAQPGGSLRLSCAASGFTFSNYAMSWARQAPGKGLEWVSGIYSDGSGTYYADSVEGRFTISRDNAKNTVYLQMSSLKPEDTALYYCAKGARSGGYYPWDDVWGQGTQVTVSS

SEQ ID NO: 4375 - protein, 122 aa, synthetic construct
EVQLVESGGGLAQPGGSLRLSCAASGFTFSNYAMSWARQAPGKGLEWVSGIYSDGSGTYYADSVKGRFTISRDNAKNTVYLQMSSLKPEDTALYFCAKGARSGSYYPWDGVWGQGTQVTVSS

SEQ ID NO: 4376 - protein, 122 aa, synthetic construct
EVQLVESGGGLAQPGGSLRLSCAASGFTFSNYAMSWARQAPGKGLEWVSGIYSDGSGTYYADSVKGRFTISRDNAKNVVYLQMNSLKAEDTALYYCAKGLNSGSYYPWDDNWGQGTQVTVSS

SEQ ID NO: 4377 - protein, 122 aa, synthetic construct
EVQLVESGGGLAQPGGSLRLSCAASGFTFSNYAMSWARQAPGKGLEWVSGIYSDSSATYYADSVKGRFTISRDNAKNTVYLQMNSLKPEDTALYYCAKGLNSGSYYPWDDYWGQGTQVTVSS

SEQ ID NO: 4378 - protein, 122 aa, synthetic construct
EVQLVESGGGLAQPGGSLRLSCAASGFTFSNYAMSWARQAPGKGLEWVSGIYSDGSGTYYADSVKGRFTISRDNAKNTVYLQMNSLKAEDTALYYCAKGLNSGSYYPWDDYWGQGTQVTVSS

SEQ ID NO: 4379 - protein, 122 aa, synthetic construct
EVQLVESGGGLAQPGGSLRLSCAASGFTFSNYAMSWARQAPGKGLEWVSGIYSDGSGTYYADSVKGRFTISRDNAKNTVYLQMNSLKPEDTALYYCAKGRNSGSYYPWDDHWGQGTQVTVSS

SEQ ID NO: 4380 - protein, 122 aa, synthetic construct
EVQLVESGGGLAQPGGSLRLSCAASGFTFSNYAMSWARQAPGKGLEWVSGIYSDGSDTYSADSVKGRFTISRDNAKNTVYLQMNSLKPEDTALYYCLKGKNSGSYYPWDDYWGQGTQVTVSS

SEQ ID NO: 4381 - protein, 122 aa, synthetic construct
EVQLVESGGGLAQPGGSLRLSCAASGFTFSSYAMSWVRQAPGKGLEWVSGIYSDGSDTYSADSVKGRFTISRDNAKNTVYLQMNSLKPEDTALYYCVKGKNSGSYYPWDDYWGQGTQVTVSS

SEQ ID NO: 4382 - protein, 122 aa, synthetic construct
EVQLVESGGGLAQPGGSLRLSCAASGFTFSNYAMSWARQAPGKGLEWVSGIYSDGSGTYYADSVKGRFTISRDNAKNTVYLQMNSLKPEDTALYYCANGRNSGSYYPWDDYWGQGTQVTVSS

SEQ ID NO: 4383 - protein, 122 aa, synthetic construct
EVQLVESGGGLAQPGGSLRLSCAASGFTFSNYAMSWARQAPGKGLEWVSGIYSDGSGTYYADSVKGRFTISRDNAKNVVYLQMNSLKAEDTALYYCAKGLNSGGYYPWDDNWGQGTQVTVSS

SEQ ID NO: 4384 - protein, 122 aa, synthetic construct
EVQLVESGGGLAQPGGSLRLSCAASGFTFSNYAMSWARQAPGKGLEWVSGIYSDGSGTYYADSVKGRFTISRDNAKNVVYLQMNSLKAEDTALYYCAKGLNRGSYYPWDDNWGQGTQVTVSS

SEQ ID NO: 4385 - protein, 122 aa, synthetic construct
EVQLVESGGGLAQPGGSLRLSCAASGFTFSNYAMSWARQAPGKGLEWVSGIYSDGSGTYYADSVKGRFTISRDNAKNVVYLQMNSLKAEDTALYYCAKGLSSGSYYPWDDNWGQGTQVTVSS

SEQ ID NO: 4386 - protein, 122 aa, synthetic construct
EVQLVESGGGLAQPGGSLRLSCAASGFTFSNYAMSWARQAPGKGLEWVSGIYSDGSGTYYADSVKGRFTISRDNAKNVVYLQMNSLKAEDTALYYCAKGLNSGSYDPWDDNWGQGTQVTVSS

SEQ ID NO: 4387 - protein, 122 aa, synthetic construct
EVQLVESGGGLAQPGGSLRLSCAAFGFTFSNYAMSWARQAPGKGLEWVSGIYSDGSGTYYADSVKGRFTISRDNAKNTVYLQMNSLKPEDTALYYCAKGRNSGSYYPWDDFWGQGTQVTVSS

SEQ ID NO: 4388 - protein, 122 aa, synthetic construct
EVQLVESGGGLAQPGGSLRLSCAASGFTFSNYAMSWARQAPGKGLEWVSGIYSDGSGTYYADSVKGRFTISRDNAKNVVYLQMNSLKAEDTALYYCAKGLKSGSYYPWDDNWGQGTQVTVSS

SEQ ID NO: 4389 - protein, 122 aa, synthetic construct
EVQLVESGGGLAQPGGSLRLSCAASGFTFSNYAMSWARQAPGKGLEWVSGIYSDGSGTYYADSVKGRFTISRDNAKNVVYLQMNSLKAEDTALYYCATGLNSGSYYPWDDNWGQGTQVTVSS

SEQ ID NO: 4390 - protein, 122 aa, synthetic construct
EVQLVESGGGLAQPGGSLRLSCAASGFTFSNYAMSWARQAPGKGLEWVSGIYSDGSGTYYADSVKGRFTISRDNAKNVVYLQMNGLKAEDTALYYCAKGLNSGSYYPWDDNWGQGTQVTVSS

SEQ ID NO: 4391 - protein, 122 aa, synthetic construct
EVQLVESGGGLVQPGGSLRLSCAASGFTFSNYAMSWARQAPGKGLEWVSGIYSDGSGTYYADSVKGRFTISRDNAKNVVYLQMNSLKAEDTALYYCAKGLNSGSYYPWDDNWGQGTQVTVSS

SEQ ID NO: 4392 - protein, 122 aa, synthetic construct
EVQLVESGGGLAQPGGSLRLSCAASGFTFSNYAMSWARQAPGKGLEWVSGIYSDSSATYYADSVKGRFTISRDNAKNTVYLQMNSLKPEDTALYYCAKGLNSGSYYPWDGYWGQGTQVTVSS

SEQ ID NO: 4393 - protein, 122 aa, synthetic construct
EVQLVESGGGLAQPGGSLRLSCAASGFTFSNYAMSWARQAPGKGLEWVSGIYSDGSGTYYADSVKGRFTISRDNAKNTVYLQMNSLKPEDTALYYCAKGLNSGSYYPWDVYWGQGTQVTVSS

SEQ ID NO: 4394 - protein, 122 aa, synthetic construct
EVQLVESGGGLAQPGGSLRLSCAASGFTFSNYAMSWARQAPGKGLEWVSGIYSDGSGTYYADSVKGRFTISRDNAKNTVYLQMNSLKAEDTALYYCAKGLNSGSYYPWYDYWGQGTQVTVSS

SEQ ID NO: 4395 - protein, 122 aa, synthetic construct
EVQLVESGGGLAQPGGSLRLSCAASGFTFSNYAMSWARQAPGKGLEWVSGIYSDSSATYYADSVKGRFTISRDNAKNTVYLQMNSLKPEDTALYYCAKGLNSGSYYPWDVYWGQGTQVTVSS

SEQ ID NO: 4396 - protein, 122 aa, synthetic construct
EVQLVESGGGLAQPGGSLRLSCAASGFTFSNYAMSWARQAPGKGLEWVSGIYSDGSGTYYADSVKGRFTISRDNAKNTVYLQMNSLKPEDTALYYCAKGSNSGSYYPLDDYWGQGTQVTVSS

SEQ ID NO: 4397 - protein, 122 aa, synthetic construct
EVQLVESGGGLAQPGGSLRLSCAASGFTFSNYAMSWARQAPGKGLEWVSGIYSDGSGTYYADSVKGRFTISRDNAKNVVYLQMNSLKAEDTALYYCAKGLNSGRYYPWDDNWGQGTQVTVSS

SEQ ID NO: 4398 - protein, 122 aa, synthetic construct
EVQLVESGGGLAQPGGSLRLSCAASGFTFSNYAMSWVRQAPGKGLEWVSGIYSDGSGTYYADSVKGRFTISRDNAKNTVYLQMNSLKPEDTALYYCAKGRNSGSYYPWDDHWGQGTQVTVSS

SEQ ID NO: 4399 - protein, 122 aa, synthetic construct
EVQLVESGGGLVQPGGSLRLSCAASGFTFSNYAMSWARQAPGKGLEWVSGIYSDGSDTYSADSVKGRFTISRDNAKNTVYLQMNSLKPEDTALYYCLKGKNSGSYYPWDDYWGQGTQVTVSS

SEQ ID NO: 4400 - protein, 122 aa, synthetic construct
EVQLVESGGGLAQPGGSLRLSCAASGFTFSNYAMSWVRQAPGKGLEWVSGIYSDGSGTYYADSVKGRFTISRDNAKNTVYLQMNSLKPEDTALYYCANGRNSGSYYPWDDYWGQGTQVTVSS

SEQ ID NO: 4401 - protein, 122 aa, synthetic construct
EVQLVESGGGLAQPGGSLRLSCAASGFTFSNYAMNWARQAPGKGLEWVSGIYSDGSGTYYADSVKGRFTISRDNAKNTVYLQMNSLKPEDTALYYCGKGLHSGSYYPFDDYWGQGTQVTVSS

SEQ ID NO: 4402 - protein, 122 aa, synthetic construct
EVQLVESGGGLVQPGGSLRLSCAASGFTFSNYAMNWARQAPGKGLEWVSGIYSDGSGTYYADSVKGRFTISRDNAKNTVYLQMNSLKPEDTALYYCGKGLHSGSYYPFDDYWGQGTQVTVSS

SEQ ID NO: 4403 - protein, 122 aa, synthetic construct
EVQLVESGGGLVQPGGSLRLSCAASGFTFSIYAMSWARQAPGKGLEWVSGIYSDGSNTYYADSVKGRFTISRDNAKNTVYLQMNSLKPEDTALYYCLKGRHSGSYYPWDDYWGQGTQVTVSS

SEQ ID NO: 4404 - protein, 122 aa, synthetic construct
EVQLVESGGGLAQPGGSLRLSCAASGFTFSIYAMSWARQAPGKGLEWVSGIYSDGSNTYYADSVKGRFTISRDNAKNTVYLQMNSLKPEDTALYYCLKGRHSGSYYPWDDYWGQGTQVTVSS

SEQ ID NO: 4405 - protein, 122 aa, synthetic construct
EVQLVESGGGLAQPGGSLRLSCAASGFTFSYYAMSWVRQAPGKGLEWVSGIYSDGSGTYYADSVKGRFTISRDNARNTVYLQMNSLKPEDTALYYCVKGRHSGSYYPWDDYWGQGTQVTVSS

SEQ ID NO: 4406 - protein, 122 aa, synthetic construct
EVQLVESGGGLVQAGGSLRLSCAASGFTFSNYAMNWARQAPGKGLEWVSGIYSDGSGTYYTDSVKGRFTISRDDAKNTVYLQMNSLKPEDTALYYCGKGLHSGSYYPFDDYWGQGTQVTVSS

SEQ ID NO: 4407 - protein, 122 aa, synthetic construct
EVQLVESGGGLVQPGGSLRLSCAASGFTFSNYAMSWARQAPGKGLEWVSGIYSDGSGTYYADSVKGRFTISRDNAKNTVYLQMNSLKPEDTALYYCIKARNSGSYYPWDDYWGQGTQVTVSS

SEQ ID NO: 4408 - protein, 122 aa, synthetic construct
EVQLVESGGGLAQPGGSLRLSCAASGFTFSNYAMSWARQAPGKGLEWVSGIYSDGSGTYYADSVKGRFTISRDNAKNTVYLQMNSLKPEDTALYYCIKARNSGSYYPWDDYWGQGTQVTVSS

SEQ ID NO: 4409 - protein, 122 aa, synthetic construct
EVQLVESGGGLAQPGGSLRLSCAASGFTFSNYAMSWARQAPGKGLEWVSGIYSDGSGTYYADSVKGRFTISRDNAKNTVYLQMNSLKPEDTALYYCATGRNSGSYYPWDDYWGQGTQVTVSS

SEQ ID NO: 4410 - protein, 122 aa, synthetic construct
EVQLVESGGGLAQPGGSLRLSCAASGFTFSNYAMSWARQAPGKGLEWVSGIYSDGSGTYYADSVKGRFTISRDNAKNTVYLQMNSLKPEDTALYYCTKGRNSGSYYPWDDYWGQGTQVTVSS

SEQ ID NO: 4411 - protein, 122 aa, synthetic construct
EVQLVESGGGLAQPGGSLRLSCAASGFTFSNYAMSWARQAPGKGLEWVSGIYSDGSGTYYADSVKGRFTISRDNAKNTVYLQMNSLKPEDTALYYCSKGRNSGSYYPWDDYWGQGTQVTVSS

SEQ ID NO: 4412 - protein, 122 aa, synthetic construct
EVQLVESGGGLAQPGGSLRLSCAASGFTFSNYAMSWARQAPGKGLEWVSGIYSDGSGTYYADSVKGRFTISRDNAKNTVYLQMNSLKPEDTALYYCAKWRNSGSYYPWDDYWGQGTQVTVSS

SEQ ID NO: 4413 - protein, 122 aa, synthetic construct
EVQLVESGGGLAQPGGSLRLSCAASGFTFSNYAMSWARQAPGKGLEWVSGIYSDGRGTYYADSVKGRFTISRDNAKNTVYLQMDSLKPEDTALYYCLKGRNSGSYYPWDDYRGQGTQVTVSS

SEQ ID NO: 4414 - protein, 122 aa, synthetic construct
EVQLVESGGGLAQPGGSLRLSCAASGFTFSNYAMSWARQAPGKGLEWVSGIYSDGSGTYYADSVKGRFTISRDNAKNTVYLQMNSLKPEDTALYYCIKARNSGSYDPWDDHWGQGTQVTVSS

SEQ ID NO: 4415 - protein, 122 aa, synthetic construct
EVQLVESGGGLAQPGGSLRLSCAASGFTFSNYAMSWARQAPGKGLEWVSGIYSDGSGTYYADSVKGRFTISRDNAKNTVYLQMNSLKPEDTALYYCKKARNSGSYYPWDDSWGQGTQVTVSS

SEQ ID NO: 4416 - protein, 122 aa, synthetic construct
EVQLVESGGGLAQPGGSLRLSCAASGFTFSNYAMSWARQAPGKGLEWVSGIYSDGSGTYYADSVKGRFTISRDNAKNTVYLQMNSLKPEDTALYYCAIGRNSGSYYPWDDYWGQGTQVTVSS

SEQ ID NO: 4417 - protein, 122 aa, synthetic construct
EVQLVESGGGLAQPGGSLRLSCAASGFTFSNYAMSWARQAPGKGLEWVSGIYSDGSGTYYADSVKGRFTISRDNAKNTVYLQMNSLKPEDTALYYCEKGRNSGSYYPWDDYWGQGTQVTVSS

SEQ ID NO: 4418 - protein, 122 aa, synthetic construct
EVQLVESGGGLAQPGGSLRLSCAASGFTFSNYAMSWVRQAPGKGLEWVSGIYSDGSGTYSADSVKGRFTISRDNAKNTVYLQMNSLKPDDTALYYCAKAKHSGSYYPWDDYWGQGTQVTVSS

SEQ ID NO: 4419 - protein, 122 aa, synthetic construct
EVQLVESGGGLAQPGGSLRLSCAASGFTFSNYAMSWARQAPGKGLEWVSGIYSDGSGTYYADSVKGRFTISRDNAKNTVYLQMNSLKPEDTALYYCITARNSGSYYPWDDHWGQGTQVTVSS

SEQ ID NO: 4420 - protein, 122 aa, synthetic construct
EVQLVESGGGLAQPGGSLRLSCAASGFTFSNYAMSWVRQAPGKGLEWVSGIYSDGSGTYSADSVKGRFTISRDNAKNTVYLQMNSLKPDDTALYYCAKGKQSGSYYPWDDYWGQGTQVTVSS

SEQ ID NO: 4421 - protein, 122 aa, synthetic construct
EVQLVESGGGLAQPGGSLRLSCAASGFTFSNYAMSWARQAPGKGLEWVSGIYSDGSGTYYADSVKGRFTISRDNAKNTVYLQMNSLKPEDTALYYCAKGRNGGSYYPWDDYWGQGTQVTVSS

SEQ ID NO: 4422 - protein, 122 aa, synthetic construct
EVQLVESGGGLAQPGGSLRLSCAASGFTFSNYAMSWVRQAPGKGLEWVSGIYSDGSGTYSADSVKGRFTISRDNAKNTVYLQMNSLKPDDTALYYCAKGKHGGSYYPWDDYWGQGTQVTVSS

SEQ ID NO: 4423 - protein, 122 aa, synthetic construct
EVQLVESGGGLAQPGGSLRLSCAASGFTFSNYAMSWVRQAPGKGLEWVSGIYSDGSGTYSADSVKGRFTISRDNAKNTVYLQMNSLKPDDTALYYCAKGKHSGSYDPWDDYWGQGTQVTVSS

SEQ ID NO: 4424 - protein, 122 aa, synthetic construct
EVQLVESGGGLAQPGGSLRLSCAASGFTFSNYAMSWVRQAPGKGLEWVSGIYSDGSGTYSADSVKGRFIISRDNAKNTVYLQMNSLKPDDTALYYCAKGKHSGSYYPWDGYWGQGTQVTVSS

SEQ ID NO: 4425 - protein, 122 aa, synthetic construct
EVQLVESGGGLAQPGGSLRLSCAASGFTFSNYAMSWVRQAPGKGLEWVSGIYSDGSGTYSADSVKGRFTISRDNAKNTVYLQMNSLKPDDTALYYCANGKHSGSYYPWDDYWGQGTQVTVSS

SEQ ID NO: 4426 - protein, 122 aa, synthetic construct
EVQLVESGGGLAQPGGSLRLSCAASGFTFSNYAMSWVRQAPGKGLEWVSGIYSDGSGTYSADSVKGRFTISRDNAKNTVYLQMNSLKPDDTALYYCAKGKHRGSYYPWDDYWGQGTQVTVSS

SEQ ID NO: 4427 - protein, 122 aa, synthetic construct
EVQLVESGGGLAQPGGSLRLSCAASGFTFSNYAMSWVRQAPGKGLEWVSGIYSDGSGTYSADSVKGRFTISRDNAKNTVYLQMNSLKPDDTALYYCATGKHSGSYYPWDDYWGQGTQVTVSS

SEQ ID NO: 4428 - protein, 122 aa, synthetic construct
EVQLVESGGGLAQPGGSLRLSCAASGFTFSNYAMSWVRQAPGKGLEWVSGIYSDGSGTYSADSVKGRFTISRDNAKNTVYLQMNSLKPDDTALYYCAKGKHSGRYYPWDDYWGQGTQVTVSS

SEQ ID NO: 4429 - protein, 122 aa, synthetic construct
EVQLVESGGGLAQPGGSLRLSCAASGFTFSNYAMSWARQAPGKGLEWVSGIYGDGSGTYYADSVKGRFTISRDNAKNTVYLQMNSLKPEDTALYYCAKGRGGGSYYPWDDYWGQGTQVTVSS

SEQ ID NO: 4430 - protein, 122 aa, synthetic construct
EVQLVESGGGLAQPGGSLRLSCAASGFTFSNYAMSWVRQAPGKGLEWVSGIYSDGSGTYSADSVKGRFTISRDNAKNTVYLQMNSLKPDDTALYYCAKGKHSGSYYPWDAYWGQGTQVTVSS

SEQ ID NO: 4431 - protein, 122 aa, synthetic construct
EVQLVESGGGLAQPGGSLRLSCAASGFTFSNYAMSWVRQAPGKGLEWVSGIYSDGSGTYSADSVKGRFTISRDNAKNTVYLQMNSLKPDDTALYYCAKVKHSGSYYPWDDYWGQGTQVTVSS

SEQ ID NO: 4432 - protein, 122 aa, synthetic construct
EVQLVESGGGLAQPGGSLRLSCAASGFTFSNYAMSWARQAPGKGLEWVSGIYSDSSGTYYADSVKGRFTISRDNAKNTVYLQMNSLKPEDTALYYCAKGRGGGSYYPFDDYWGQGTQVTVSS

SEQ ID NO: 4433 - protein, 122 aa, synthetic construct
EVQLVESGGGLAQPGGSLRLSCAASGFTFSYYAMSWVRQAPGKGLEWVSGIYSDGSGTYYADSVKGRFTISRDNAKNTVYLQMNSLKPEDTALYYCATGRHSGSYYPWDDYWGQGTQVTVSS

SEQ ID NO: 4434 - protein, 122 aa, synthetic construct
EVQLVESGGGLAQPGGSLRLSCAASGFTFSNYAMSWVRQAPGKGLEWVSGIYSDGSGTYSADSVKGRFTISRDNAKNTVYLQMNSLKPDDTALYYCAKGKHSGSYYPWDDHWGQGTQVTVSS

SEQ ID NO: 4435 - protein, 122 aa, synthetic construct
EVQLVESGGGLAQPGGSLRLSCAASGFTFSNYAMSWVRQAPGKGLEWVSGIYSDGSGTYSADSVKGRFTISRDNAKNTVYLQMNSLKPDDTALYYCAKGKPSGSYYPWDDYWGQGTQVTVSS

SEQ ID NO: 4436 - protein, 122 aa, synthetic construct
EVQLVESGGGLAQPGGSLRLSCAASGFTFSNYAMSWARQAPGKGLEWVSGIYSDGSGTYYADSVKGRFTISRDNAKNTVYLQMNSLKPEDTALYYCAKGRNSGSYYPFDDYWGQGTQVTVSS

SEQ ID NO: 4437 - protein, 122 aa, synthetic construct
EVQLVESGGGLAQPGGSLRLSCAASGFTFSNYAMSWARQAPGKGLEWVSGIYSDSSGTYYADSVKGRFTISRDNAKNTVYLQMNSLKPEDTALYYCAKGRGSGSYYPFDAYWGQGTQVTVSS

SEQ ID NO: 4438 - protein, 122 aa, synthetic construct
EVQLVESGGGLAQPGGSLRLSCAASGFTFSNYAMSWARQAPGKGLEWVSGIYSDSSGTYYADSVKGRFTISRDNAKNTVYLQMNSLKPEDTALYYCAKGRGSGSYYPLDDYWGQGTQVTVSS

SEQ ID NO: 4439 - protein, 122 aa, synthetic construct
EVQLVESGGGLAQPGGSLRLSCAASGFTFSNYAMSWARQAPGKGLEWVSGIYSDSSGTYYADSVKGRFTISRDNAKNTVYLQMNSLKPEDTALYYCAKGRGSGGYYPFDDYWGQGTQVTVSS

SEQ ID NO: 4440 - protein, 122 aa, synthetic construct
EVQLVESGGGLAQPGGSLRLSCAASGFTFSNYAMSWARQAPGKGLEWVSGIYSDSSGTYYADSVKGRFTISRDNAKNTVYLQMNSLKPEDTALYYCAKGRGSGSYYPFEDYWGQGTQVTVSS

SEQ ID NO: 4441 - protein, 122 aa, synthetic construct
EVQLVESGGGLAQPGGSLRLSCAASGFTFSNYAMSWARQAPGKGLEWVSGIYSDSSGTYYADSVKGRFTISRDNAKNTVYLQMNSLKPEDTALYYCAKGRGSGSYYPIDDYWGQGTQVTVSS

SEQ ID NO: 4442 - protein, 122 aa, synthetic construct
EVQLVESGGGLAQPGGSLRLSCAASGFTFSNYAMSWARQAPGKGLEWVSGIYSDSSGTYYADSVKGRFTISRDNAKNTVYLQMNSLKPEDTALYYCAKGRGRGSYYPFDDYWGQGTQVTVSS

SEQ ID NO: 4443 - protein, 122 aa, synthetic construct
EVQLVESGGGLAQPGGSLRLSCAASGFTFSNYAMSWARQAPGKGLEWVSGIYSDGSGTYYADSVKGRFTISRDNAKNTVYLQMNSLKPEDTALYYCSKGRGSGSYYPWDDYWGQGTQVTVSS

SEQ ID NO: 4444 - protein, 122 aa, synthetic construct
EVQLVESGGGLAQPGGSLRLSCAASGFTFSNYAMSWARQAPGKGLEWVSGIYSDSSGTYYADSVKGRFTISRDNAKNTVYLQMNSLKPEDTALYYCAKGRGSGSYDPFDDYWGQGTQVTVSS

SEQ ID NO: 4445 - protein, 122 aa, synthetic construct
EVQLVESGGGLAQPGGSLRLSCAASGFTFSNYAMSWARQAPGKGLEWVSGIYSDSSGTYYADSVKGRFTISRDNAKNTVYLQMNSLKPEDTALYYCSKGRGSGSYYPFDDYWGQGTQVTVSS

SEQ ID NO: 4446 - protein, 122 aa, synthetic construct
EVQLVESGGGLAQPGGSLRLSCAASGFTFSNYAMSWARQAPGKGLEWVSGIYSDSSGTYYADSVKGRFTISRDNAKNTVYLQMNSLKPEDTALYYCAKGRGSGSYYPFDVYWGQGTQVTVSS

SEQ ID NO: 4447 - protein, 122 aa, synthetic construct
EVQLVESGGGLAQPGGSLRLSCAASGFTFSNYAMSWARQAPGKGLEWVSGIYSDGSGTYYADSVKGRFTISRDNAKNTVYLQMNSLKPEDTALYYCEKGRGSGSYYPWDDYWGQGTQVTVSS

SEQ ID NO: 4448 - protein, 122 aa, synthetic construct
EVQLVESGGGLAQPGGSLRLSCAASGFTFSNYAMSWARQAPGKGLEWVSGIYSDSSGTYYADSVKGRFTISRDNAKNTVYLQMNSLKPEDTALYYCATGRGSGSYYPFDDYWGQGTQVTVSS

SEQ ID NO: 4449 - protein, 122 aa, synthetic construct
EVQLVESGGGLAQPGGSLRLSCAASGFTFSNYAMSWARQAPGKGLEWVSGIYSDSSGTYYADSVKGRFTISRDNAKNTVYLQMNSLKPEDTALYYCAKGRGSGSYYPFDDHWGQGTQVTVSS

SEQ ID NO: 4450 - protein, 122 aa, synthetic construct
EVQLVESGGGLVQPGGSLRLSCAASGFTFSNYAMSWARQAPGKGLEWVSGIYSDGSGTYYADSVKGRFTISRDNAKNTVYLQMNSLKPEDTALYYCAKGRNSGSYYPFDDYWGQGTQVTVSS

SEQ ID NO: 4451 - protein, 122 aa, synthetic construct
EVQLVESGGGLAQPGGSLRLSCAASGFTFSNYAMSWTRQAPGKGLEWVSGIYSDGSGTYYADSVKGRFTISRDNAKNTVYLQMNSLKPEDTALYYCAKGRNSGSYYPFDDYWGQGTQVTVSS

SEQ ID NO: 4452 - protein, 122 aa, synthetic construct
EVQLLESGGGLAQPGGSLRLSCAASGFTFSYYAMSWARQAPGKGLEWVAGIYSDGSGTYYADSVKGRFTISRDNAKNTVYLQMNSLRPEDTAVYYCAKGARSGSYYPWDDYWGQGTQVTVSS

SEQ ID NO: 4453 - protein, 122 aa, synthetic construct
EVQLLESGGGLAQPGGSLRLSCAASGFTFSNYAMSWARQAPGKGLEWVSGIYSDGSGTYYADSVKGRFTISRDNAKNTVYLQMNSLRPEDTGVYYCAKGARSGSYYPWDDYWGQGTQVTVSS

SEQ ID NO: 4454 - protein, 122 aa, synthetic construct
EVQLLESGGGLAQPGGSLRLSCAASGFTFSNYAMSWARQAPGKGLEWVSGIYSDGSGTYYADSVKGRFTISRDNAKNTVYLQMNSLRPEDTAVYYCAKGARSGSYYPWDDVWGQGTQVTVSS

SEQ ID NO: 4455 - protein, 122 aa, synthetic construct
EVQLLESGGGLVQPGGSLRLSCAASGFTFSNYAMSWARQAPGKGLEWVSGIYSDGSGTYYADSVKGRFTISRDNAKNTVYLQMNSLRPEDTAVYYCAKGAGSGSYYPWDDVWGQGTQVTVSS

SEQ ID NO: 4456 - protein, 122 aa, synthetic construct
EVQLLESGGGLAQPGGSLRLSCAASGFTFSNYAMSWARQAPGKGLEWVSGIYSDGSGTYYADSVKGRFTISRDNAKNTVYLQMNSLRPEDTAVYYCAKGAGSGSYYPWDDVWGQGTQVTVSS

SEQ ID NO: 4457 - protein, 122 aa, synthetic construct
EVQLLESGGGLAQPGGSLRLSCAASGFTFSNYAMSWARQAPGKGLEWVSGIYSDGSGTYYADSVKGRFTISRDNAKNTVYLQMNSLRPEDTAVYYCAKGARSGSYDPWDDVWGQGTQVTVSS

SEQ ID NO: 4458 - protein, 122 aa, synthetic construct
EVQLLESGGGLAQPGGSLRLSCAASGFTFSNYAMSWARQAPGKGLEWVSGIYSDGSGTYYADSVKGRFTISRDNAKNTVYLQMNSLRPEDTAVYYCSKGARSGSYYPWDDVWGQGTQVTVSS

SEQ ID NO: 4459 - protein, 122 aa, synthetic construct
EVQLLESGGGLAQPGGSLRLSCAASGFTFSNYAMSWARQAPGKGLEWVSGIYSDGSGTYYADSVKGRFTISRDNAKNTVYLQMNSLRPEDTAVYYCAKGASSGSYYPWDDVWGQGTQVTVSS

SEQ ID NO: 4460 - protein, 122 aa, synthetic construct
EVQLLESGGGLAQPGGSLRLSCAASGFTFSNYAMSWARQAPGKGLEWVSGIYSDGSGTYYADSVKGRFTISRDNAKNTVYLQMNSLRPEDTAVYYCAKGARSGSYYPWDGVWGQGTQVTVSS

SEQ ID NO: 4461 - protein, 122 aa, synthetic construct
EVQLLESGGGLAQPGGSLRLSCAASGFTFSNYAMSWARQAPGKGLEWVSGIYSDGSGTYYADSVKGRFTISRDNAKNTVYLQMNSLRPEDTAVYYCAQGARSGSYYPWDDVWGQGTQVTVSS

SEQ ID NO: 4462 - protein, 122 aa, synthetic construct
EVQLLESGGGLAQPGGSLRLSCAASGFTFSNYAMSWARQAPGKGLEWVSGIYSDGSGTYYADSVKGRFTISRDNAKNTVYLQMNSLRPEDTAVYYCATGARSGSYYPWDDVWGQGTQVTVSS

SEQ ID NO: 4463 - protein, 122 aa, synthetic construct
EVQLLESGGGLAQPGGSLRLSCAASGFTFSNYAMSWARQAPGKGLEWVSGIYSDGSGTYYADSVKGRFTISRDNAKNTVYLQMNSLRPEDTAVYYCAKGDRSGSYYPWDDVWGQGTQVTVSS

SEQ ID NO: 4464 - protein, 122 aa, synthetic construct
EVQLLESGGGLAQPGGSLRLSCAASGFTFSNYAMSWARQAPGKGLEWVSGIYSDGSGTYYADSVKGRFTISRDNAKNTVYLQMNSLRPEDTAVYYCAKGSRSGSYYPWDDVWGQGTQVTVSS

SEQ ID NO: 4465 - protein, 122 aa, synthetic construct
EVQLLESGGGLAQPGGSLRLSCAASGFTFSNYAMSWARQAPGKGLEWVSGIYSDGSGTYYADSVKGRFTISRDNAKNTVYLQMNSLRPEDTAVYYCAKGARSGSYYPWDNVWGQGTQVTVSS

SEQ ID NO: 4466 - protein, 122 aa, synthetic construct
EVQLLESGGGLAQPGGSLRLSCAASGFTFSNYAMSWARQAPGKGLEWVSGIYSDGSGTYYADSVKGRFTISRDNAKNTVYLQMNSLRPEDTAVYYCAKGARRGSYYPWDDVWGQGTQVTVSS

SEQ ID NO: 4467 - protein, 122 aa, synthetic construct
EVQLLESGGGLAQPGGSLRLSCAASGFTFSNYAMSWARQAPGKGLEWVSGIYSDGSGTYYADSVKGRFTISRDNAKNTVYLQMNSLRPEDTAVYYCVKGARSGSYYPWDDVWGQGTQVTVSS

SEQ ID NO: 4468 - protein, 122 aa, synthetic construct
EVQLLESGGGLAQPGGSLRLSCAASGFTFSNYAMSWARQAPGKGLEWVSGIYSDGSGTYYADSVKGRFTISRDNAKNTVYLQMNSLRPEDTAVYYCAKGARSGSYYPWYDVWGQGTQVTVSS

SEQ ID NO: 4469 - protein, 122 aa, synthetic construct
EVQLLESGGGLAQPGGSLRLSCAASGFTFSNYAMSWARQAPGKGLEWVSGIYSDGSGTYYADSVKGRFTISRDNAKNTVYLQMNSLRPEDTAVYYCTKGARSGSYYPWDDVWGQGTQVTVSS

SEQ ID NO: 4470 - protein, 122 aa, synthetic construct
EVQLLESGGGLAQPGGSLRLSCAASGFTFSNYAMSWARQAPGKGLEWVSGIYSDGSGTYYADSVKGRFTISRDNAKNTVYLQMNSLRPEDTAVYYCAKGARSGIYYPWDDVWGQGTQVTVSS

SEQ ID NO: 4471 - protein, 122 aa, synthetic construct
EVQLLESGGGLAQPGGSLRLSCAASGFTFSNYAMSWARQAPGKGLEWVSGIYSDGSGTYYADSVKGRFTISRDNAKNTVYLQMNSLRPEDTAVYYCAKGARSGSDYPWDDVWGQGTQVTVSS

SEQ ID NO: 4472 - protein, 122 aa, synthetic construct
EVQLLESGGGLAQPGGSLRLSCAASGFTFSNYAMSWARQAPGKGLEWVSGIYSDGSGTYYADSVKGRFTISRDNAKNTVYLQMNSLRPEDTAVYYCAKGARSGSYYPWDVVWGQGTQVTVSS

SEQ ID NO: 4473 - protein, 122 aa, synthetic construct
EVQLLESGGGLAQPGGSLRLSCAASGFTFSNYAMSWARQAPGKGLEWVSGIYSDGSGTYYADSVKGRFTISRDNAKNTVYLQMNSLRPEDTAVYYCAKGARGGSYYPWDDVWGQGTQVTVSS

SEQ ID NO: 4474 - protein, 122 aa, synthetic construct
EVQLLESGGGLAQPGGSLRLSCAASGFTFSNYAMSWARQAPGKGLEWVSGIYSDGSGTYYADSVKGRFTISRDNAKTTVYLQMNSLRPEDTAVYYCAKGARSGSYDPWDDVWGQGTQVTVSS

SEQ ID NO: 4475 - protein, 122 aa, synthetic construct
EVQLLESGGGLAQPGGSLRLSCAASGFTFSNYAMSWARQAPGKGLEWVSGIYSDGSGTYYADSVKGRFTISRDNAKNTVYLQMNSLRPEDTAVYYCAKGARSGRYYPWDDVWGQGTQVTVSS

SEQ ID NO: 4476 - protein, 122 aa, synthetic construct
EVQLLESGGGLAQPGGSLRLSCAASGFTFSNYAMSWARQAPGKGLEWVSGIYSDGSGTYYADSVKGRFTISRDNAKNTVYLQMNSLRPEDTAVYYCEKGARSGSYYPWDDVWGQGTQVTVSS

SEQ ID NO: 4477 - protein, 122 aa, synthetic construct
EVQLLESGGGLAQPGGSLRLSCAASGFTFSNYAMSWARQAPGKGLEWVSGIYSDGSGTYYADSVKGRFTISRDTAKNTVYLQMNSLRPEDTAVYYCAKGARSGSYDPWDDVWGQGTQVTVSS

SEQ ID NO: 4478 - protein, 122 aa, synthetic construct
EVQLLESGGGLAQPGGSLRLSCAASGFTFSNYAMSWARQAPGKGLEWVSGIYSDGSGTYYADSVKGRFTISRDNAKNTVYLQMNSLRPEDTAVYYCAMGARSGSYYPWDDVWGQGTQVTVSS

SEQ ID NO: 4479 - protein, 122 aa, synthetic construct
EVQLLESGGGLAQPGGSLRLSCAASGFTFSDYAMSWARQAPGKGLEWVSGIYSDGSGTYYADSVKGRFTISRDNAKNTVYLQMNSLRPEDTAVYYCAKGVRSGSYYPWDDVWGQGTQVTVSS

SEQ ID NO: 4480 - protein, 122 aa, synthetic construct
EVQLLESGGGLAQPGGSLRLSCAASGFTFSNYAMSWARQAPGKGLEWVSGIYSDGSGTYYADSVKGRFTISRDNAKNTVYLQMNSLRPEDTAVYYCAKGARSGSYYPLDDVWGQGTQVTVSS

SEQ ID NO: 4481 - protein, 122 aa, synthetic construct
EVQLLESGGGLAQPGGSLRLSCAASGFTFSNYAMSWARQAPGKGLEWVSGIYSDGSGTYYADSVKGRFTISRDNAKNTVYLQMNSLRPEDTAVYYCAKGARSGSSYPWDDVWGQGTQVTVSS

SEQ ID NO: 4482 - protein, 122 aa, synthetic construct
EVQLLESGGGLAQPGGSLRLSCAASGFTFSNYAMSWARQAPGKGLEWVSGIYSDGSGTYYADSVKGRFTISRDNAKNTVYLQMNSLRPEDTAVYYCAKVARSGSYYPWDDVWGQGTQVTVSS

SEQ ID NO: 4483 - protein, 122 aa, synthetic construct
EVQLLESGGGLAQPGGSLRLSCAASGFTFSNYAMSWARQAPGKGLEWVSGIYSDGSGTYYADSVKGRFTISRDNAKNTVYLQMNSLRPEDTAVYYCAKGARSGSYYHWDDVWGQGTQVTVSS

SEQ ID NO: 4484 - protein, 122 aa, synthetic construct
EVQLLESGGGLAQPGGSLRLSCAASGFTFSNYAMSWARQAPGKGLEWVSGIYSDGSGTYYADSVKGRFTISRDNAKNTVYLQMNSLRPEDTAVYYCAKGARSGGYYPWDDVWGQGTQVTVSS

SEQ ID NO: 4485 - protein, 122 aa, synthetic construct
EVQLLESGGGLAQPGGSLRLSCAASGFTFSNYAMSWARQAPGKGLEWVSGIYSDGSGTYYADSVKGRFTISRDNAKNTVYLQMNSLRAEDTAVYYCAKGLNSGSYYPWDDNWGQGTQVTVSS

SEQ ID NO: 4486 - protein, 122 aa, synthetic construct
EVQLLESGGGLAQPGGSLRLSCAASGFTFSNYAMSWARQAPGKGLEWVSGIYSDSSATYYADSVKGRFTISRDNAKNTVYLQMNSLRPEDTAVYYCAKGLNSGSYYPWDDYWGQGTQVTVSS

SEQ ID NO: 4487 - protein, 122 aa, synthetic construct
EVQLLESGGGLAQPGGSLRLSCAASGFTFSNYAMSWARQAPGKGLEWVSGIYSDGSGTYYADSVKGRFTISRDNAKNTVYLQMNSLRAEDTAVYYCAKGLNSGSYYPWDDYWGQGTQVTVSS

SEQ ID NO: 4488 - protein, 122 aa, synthetic construct
EVQLLESGGGLAQPGGSLRLSCAASGFTFSNYAMSWARQAPGKGLEWVSGIYSDGSGTYYADSVKGRFTISRDNAKNTVYLQMNSLRPEDTAVYYCAKGRNSGSYYPWDDHWGQGTQVTVSS

SEQ ID NO: 4489 - protein, 122 aa, synthetic construct
EVQLLESGGGLAQPGGSLRLSCAASGFTFSNYAMSWARQAPGKGLEWVSGIYSDGSDTYYADSVKGRFTISRDNAKNTVYLQMNSLRPEDTAVYYCLKGKNSGSYYPWDDYWGQGTQVTVSS

SEQ ID NO: 4490 - protein, 122 aa, synthetic construct
EVQLLESGGGLAQPGGSLRLSCAASGFTFSSYAMSWVRQAPGKGLEWVSGIYSDGSDTYYADSVKGRFTISRDNAKNTVYLQMNSLRPEDTAVYYCVKGKNSGSYYPWDDYWGQGTQVTVSS

SEQ ID NO: 4491 - protein, 122 aa, synthetic construct
EVQLLESGGGLAQPGGSLRLSCAASGFTFSNYAMSWARQAPGKGLEWVSGIYSDGSGTYYADSVKGRFTISRDNAKNTVYLQMNSLRPEDTAVYYCANGRNSGSYYPWDDYWGQGTQVTVSS

SEQ ID NO: 4492 - protein, 122 aa, synthetic construct
EVQLLESGGGLAQPGGSLRLSCAASGFTFSNYAMSWARQAPGKGLEWVSGIYSDGSGTYYADSVKGRFTISRDNAKNTVYLQMNSLRAEDTAVYYCAKGLNSGGYYPWDDNWGQGTQVTVSS

SEQ ID NO: 4493 - protein, 122 aa, synthetic construct
EVQLLESGGGLAQPGGSLRLSCAASGFTFSNYAMSWARQAPGKGLEWVSGIYSDGSGTYYADSVKGRFTISRDNAKNTVYLQMNSLRAEDTAVYYCAKGLNRGSYYPWDDNWGQGTQVTVSS

SEQ ID NO: 4494 - protein, 122 aa, synthetic construct
EVQLLESGGGLAQPGGSLRLSCAASGFTFSNYAMSWARQAPGKGLEWVSGIYSDGSGTYYADSVKGRFTISRDNAKNTVYLQMNSLRAEDTAVYYCAKGLSSGSYYPWDDNWGQGTQVTVSS

SEQ ID NO: 4495 - protein, 122 aa, synthetic construct
EVQLLESGGGLAQPGGSLRLSCAASGFTFSNYAMSWARQAPGKGLEWVSGIYSDGSGTYYADSVKGRFTISRDNAKNTVYLQMNSLRAEDTAVYYCAKGLNSGSYDPWDDNWGQGTQVTVSS

SEQ ID NO: 4496 - protein, 122 aa, synthetic construct
EVQLLESGGGLAQPGGSLRLSCAAFGFTFSNYAMSWARQAPGKGLEWVSGIYSDGSGTYYADSVKGRFTISRDNAKNTVYLQMNSLRPEDTAVYYCAKGRNSGSYYPWDDFWGQGTQVTVSS

SEQ ID NO: 4497 - protein, 122 aa, synthetic construct
EVQLLESGGGLAQPGGSLRLSCAASGFTFSNYAMSWARQAPGKGLEWVSGIYSDGSGTYYADSVKGRFTISRDNAKNTVYLQMNSLRAEDTAVYYCAKGLKSGSYYPWDDNWGQGTQVTVSS

SEQ ID NO: 4498 - protein, 122 aa, synthetic construct
EVQLLESGGGLAQPGGSLRLSCAASGFTFSNYAMSWARQAPGKGLEWVSGIYSDGSGTYYADSVKGRFTISRDNAKNTVYLQMNSLRAEDTAVYYCATGLNSGSYYPWDDNWGQGTQVTVSS

SEQ ID NO: 4499 - protein, 122 aa, synthetic construct
EVQLLESGGGLVQPGGSLRLSCAASGFTFSNYAMSWARQAPGKGLEWVSGIYSDGSGTYYADSVKGRFTISRDNAKNTVYLQMNSLRAEDTAVYYCAKGLNSGSYYPWDDNWGQGTQVTVSS

SEQ ID NO: 4500 - protein, 122 aa, synthetic construct
EVQLLESGGGLAQPGGSLRLSCAASGFTFSNYAMSWARQAPGKGLEWVSGIYSDSSATYYADSVKGRFTISRDNAKNTVYLQMNSLRPEDTAVYYCAKGLNSGSYYPWDGYWGQGTQVTVSS

SEQ ID NO: 4501 - protein, 122 aa, synthetic construct
EVQLLESGGGLAQPGGSLRLSCAASGFTFSNYAMSWARQAPGKGLEWVSGIYSDGSGTYYADSVKGRFTISRDNAKNTVYLQMNSLRPEDTAVYYCAKGLNSGSYYPWDVYWGQGTQVTVSS

SEQ ID NO: 4502 - protein, 122 aa, synthetic construct
EVQLLESGGGLAQPGGSLRLSCAASGFTFSNYAMSWARQAPGKGLEWVSGIYSDGSGTYYADSVKGRFTISRDNAKNTVYLQMNSLRAEDTAVYYCAKGLNSGSYYPWYDYWGQGTQVTVSS

SEQ ID NO: 4503 - protein, 122 aa, synthetic construct
EVQLLESGGGLAQPGGSLRLSCAASGFTFSNYAMSWARQAPGKGLEWVSGIYSDSSATYYADSVKGRFTISRDNAKNTVYLQMNSLRPEDTAVYYCAKGLNSGSYYPWDVYWGQGTQVTVSS

SEQ ID NO: 4504 - protein, 122 aa, synthetic construct
EVQLLESGGGLAQPGGSLRLSCAASGFTFSNYAMSWARQAPGKGLEWVSGIYSDGSGTYYADSVKGRFTISRDNAKNTVYLQMNSLRPEDTAVYYCAKGSNSGSYYPLDDYWGQGTQVTVSS

SEQ ID NO: 4505 - protein, 122 aa, synthetic construct
EVQLLESGGGLAQPGGSLRLSCAASGFTFSNYAMSWARQAPGKGLEWVSGIYSDGSGTYYADSVKGRFTISRDNAKNTVYLQMNSLRAEDTAVYYCAKGLNSGRYYPWDDNWGQGTQVTVSS

SEQ ID NO: 4506 - protein, 122 aa, synthetic construct
EVQLLESGGGLAQPGGSLRLSCAASGFTFSNYAMSWVRQAPGKGLEWVSGIYSDGSGTYYADSVKGRFTISRDNAKNTVYLQMNSLRPEDTAVYYCAKGRNSGSYYPWDDHWGQGTQVTVSS

SEQ ID NO: 4507 - protein, 122 aa, synthetic construct
EVQLLESGGGLVQPGGSLRLSCAASGFTFSNYAMSWARQAPGKGLEWVSGIYSDGSDTYYADSVKGRFTISRDNAKNTVYLQMNSLRPEDTAVYYCLKGKNSGSYYPWDDYWGQGTQVTVSS

SEQ ID NO: 4508 - protein, 122 aa, synthetic construct
EVQLLESGGGLAQPGGSLRLSCAASGFTFSNYAMSWVRQAPGKGLEWVSGIYSDGSGTYYADSVKGRFTISRDNAKNTVYLQMNSLRPEDTAVYYCANGRNSGSYYPWDDYWGQGTQVTVSS

SEQ ID NO: 4509 - protein, 122 aa, synthetic construct
EVQLVESGGGLAQPGGSLRLSCAASGFTFSNYAMNWARQAPGKGLEWVSGIYSDGSGTYYADSVKGRFTISRDNAKNTVYLQMNSLRPEDTAVYYCGKGLHSGSYYPFDDYWGQGTQVTVSS

SEQ ID NO: 4510 - protein, 122 aa, synthetic construct
EVQLVESGGGLVQPGGSLRLSCAASGFTFSNYAMNWARQAPGKGLEWVSGIYSDGSGTYYADSVKGRFTISRDNAKNTVYLQMNSLRPEDTAVYYCGKGLHSGSYYPFDDYWGQGTQVTVSS

SEQ ID NO: 4511 - protein, 122 aa, synthetic construct
EVQLLESGGGLVQPGGSLRLSCAASGFTFSIYAMSWARQAPGKGLEWVSGIYSDGSNTYYADSVKGRFTISRDNAKNTVYLQMNSLRPEDTAVYYCLKGRHSGSYYPWDDYWGQGTQVTVSS

SEQ ID NO: 4512 - protein, 122 aa, synthetic construct
EVQLLESGGGLAQPGGSLRLSCAASGFTFSIYAMSWARQAPGKGLEWVSGIYSDGSNTYYADSVKGRFTISRDNAKNTVYLQMNSLRPEDTAVYYCLKGRHSGSYYPWDDYWGQGTQVTVSS

SEQ ID NO: 4513 - protein, 122 aa, synthetic construct
EVQLLESGGGLAQPGGSLRLSCAASGFTFSYYAMSWVRQAPGKGLEWVSGIYSDGSGTYYADSVKGRFTISRDNAKNTVYLQMNSLRPEDTAVYYCVKGRHSGSYYPWDDYWGQGTQVTVSS

SEQ ID NO: 4514 - protein, 122 aa, synthetic construct
EVQLVESGGGLVQPGGSLRLSCAASGFTFSNYAMNWARQAPGKGLEWVSGIYSDGSGTYYADSVKGRFTISRDDAKNTVYLQMNSLRPEDTAVYYCGKGLHSGSYYPFDDYWGQGTQVTVSS

SEQ ID NO: 4515 - protein, 122 aa, synthetic construct
EVQLLESGGGLVQPGGSLRLSCAASGFTFSNYAMSWARQAPGKGLEWVSGIYSDGSGTYYADSVKGRFTISRDNAKNTVYLQMNSLRPEDTAVYYCIKARNSGSYYPWDDYWGQGTQVTVSS

SEQ ID NO: 4516 - protein, 122 aa, synthetic construct
EVQLLESGGGLAQPGGSLRLSCAASGFTFSNYAMSWARQAPGKGLEWVSGIYSDGSGTYYADSVKGRFTISRDNAKNTVYLQMNSLRPEDTAVYYCIKARNSGSYYPWDDYWGQGTQVTVSS

SEQ ID NO: 4517 - protein, 122 aa, synthetic construct
EVQLLESGGGLAQPGGSLRLSCAASGFTFSNYAMSWARQAPGKGLEWVSGIYSDGSGTYYADSVKGRFTISRDNAKNTVYLQMNSLRPEDTAVYYCATGRNSGSYYPWDDYWGQGTQVTVSS

SEQ ID NO: 4518 - protein, 122 aa, synthetic construct
EVQLLESGGGLAQPGGSLRLSCAASGFTFSNYAMSWARQAPGKGLEWVSGIYSDGSGTYYADSVKGRFTISRDNAKNTVYLQMNSLRPEDTAVYYCTKGRNSGSYYPWDDYWGQGTQVTVSS

SEQ ID NO: 4519 - protein, 122 aa, synthetic construct
EVQLLESGGGLAQPGGSLRLSCAASGFTFSNYAMSWARQAPGKGLEWVSGIYSDGSGTYYADSVKGRFTISRDNAKNTVYLQMNSLRPEDTAVYYCSKGRNSGSYYPWDDYWGQGTQVTVSS

SEQ ID NO: 4520 - protein, 122 aa, synthetic construct
EVQLLESGGGLAQPGGSLRLSCAASGFTFSNYAMSWARQAPGKGLEWVSGIYSDGSGTYYADSVKGRFTISRDNAKNTVYLQMNSLRPEDTAVYYCAKWRNSGSYYPWDDYWGQGTQVTVSS

SEQ ID NO: 4521 - protein, 122 aa, synthetic construct
EVQLLESGGGLAQPGGSLRLSCAASGFTFSNYAMSWARQAPGKGLEWVSGIYSDGRGTYYADSVKGRFTISRDNAKNTVYLQMNSLRPEDTAVYYCLKGRNSGSYYPWDDYRGQGTQVTVSS

SEQ ID NO: 4522 - protein, 122 aa, synthetic construct
EVQLLESGGGLAQPGGSLRLSCAASGFTFSNYAMSWARQAPGKGLEWVSGIYSDGSGTYYADSVKGRFTISRDNAKNTVYLQMNSLRPEDTAVYYCIKARNSGSYDPWDDHWGQGTQVTVSS

SEQ ID NO: 4523 - protein, 122 aa, synthetic construct
EVQLLESGGGLAQPGGSLRLSCAASGFTFSNYAMSWARQAPGKGLEWVSGIYSDGSGTYYADSVKGRFTISRDNAKNTVYLQMNSLRPEDTAVYYCKKARNSGSYYPWDDSWGQGTQVTVSS

SEQ ID NO: 4524 - protein, 122 aa, synthetic construct
EVQLLESGGGLAQPGGSLRLSCAASGFTFSNYAMSWARQAPGKGLEWVSGIYSDGSGTYYADSVKGRFTISRDNAKNTVYLQMNSLRPEDTAVYYCAIGRNSGSYYPWDDYWGQGTQVTVSS

SEQ ID NO: 4525 - protein, 122 aa, synthetic construct
EVQLLESGGGLAQPGGSLRLSCAASGFTFSNYAMSWARQAPGKGLEWVSGIYSDGSGTYYADSVKGRFTISRDNAKNTVYLQMNSLRPEDTAVYYCEKGRNSGSYYPWDDYWGQGTQVTVSS

SEQ ID NO: 4526 - protein, 122 aa, synthetic construct
EVQLLESGGGLAQPGGSLRLSCAASGFTFSNYAMSWVRQAPGKGLEWVSGIYSDGSGTYYADSVKGRFTISRDNAKNTVYLQMNSLRPEDTAVYYCAKAKHSGSYYPWDDYWGQGTQVTVSS

SEQ ID NO: 4527 - protein, 122 aa, synthetic construct
EVQLLESGGGLAQPGGSLRLSCAASGFTFSNYAMSWARQAPGKGLEWVSGIYSDGSGTYYADSVKGRFTISRDNAKNTVYLQMNSLRPEDTAVYYCITARNSGSYYPWDDHWGQGTQVTVSS

SEQ ID NO: 4528 - protein, 122 aa, synthetic construct
EVQLLESGGGLAQPGGSLRLSCAASGFTFSNYAMSWVRQAPGKGLEWVSGIYSDGSGTYYADSVKGRFTISRDNAKNTVYLQMNSLRPEDTAVYYCAKGKQSGSYYPWDDYWGQGTQVTVSS

SEQ ID NO: 4529 - protein, 122 aa, synthetic construct
EVQLLESGGGLAQPGGSLRLSCAASGFTFSNYAMSWARQAPGKGLEWVSGIYSDGSGTYYADSVKGRFTISRDNAKNTVYLQMNSLRPEDTAVYYCAKGRNGGSYYPWDDYWGQGTQVTVSS

SEQ ID NO: 4530 - protein, 122 aa, synthetic construct
EVQLLESGGGLAQPGGSLRLSCAASGFTFSNYAMSWVRQAPGKGLEWVSGIYSDGSGTYYADSVKGRFTISRDNAKNTVYLQMNSLRPEDTAVYYCAKGKHGGSYYPWDDYWGQGTQVTVSS

SEQ ID NO: 4531 - protein, 122 aa, synthetic construct
EVQLLESGGGLAQPGGSLRLSCAASGFTFSNYAMSWVRQAPGKGLEWVSGIYSDGSGTYYADSVKGRFTISRDNAKNTVYLQMNSLRPEDTAVYYCAKGKHSGSYDPWDDYWGQGTQVTVSS

SEQ ID NO: 4532 - protein, 122 aa, synthetic construct
EVQLLESGGGLAQPGGSLRLSCAASGFTFSNYAMSWVRQAPGKGLEWVSGIYSDGSGTYYADSVKGRFTISRDNAKNTVYLQMNSLRPEDTAVYYCAKGKHSGSYYPWDGYWGQGTQVTVSS

SEQ ID NO: 4533 - protein, 122 aa, synthetic construct
EVQLLESGGGLAQPGGSLRLSCAASGFTFSNYAMSWVRQAPGKGLEWVSGIYSDGSGTYYADSVKGRFTISRDNAKNTVYLQMNSLRPEDTAVYYCANGKHSGSYYPWDDYWGQGTQVTVSS

SEQ ID NO: 4534 - protein, 122 aa, synthetic construct
EVQLLESGGGLAQPGGSLRLSCAASGFTFSNYAMSWVRQAPGKGLEWVSGIYSDGSGTYYADSVKGRFTISRDNAKNTVYLQMNSLRPEDTAVYYCAKGKHRGSYYPWDDYWGQGTQVTVSS

SEQ ID NO: 4535 - protein, 122 aa, synthetic construct
EVQLLESGGGLAQPGGSLRLSCAASGFTFSNYAMSWVRQAPGKGLEWVSGIYSDGSGTYYADSVKGRFTISRDNAKNTVYLQMNSLRPEDTAVYYCATGKHSGSYYPWDDYWGQGTQVTVSS

SEQ ID NO: 4536 - protein, 122 aa, synthetic construct
EVQLLESGGGLAQPGGSLRLSCAASGFTFSNYAMSWVRQAPGKGLEWVSGIYSDGSGTYYADSVKGRFTISRDNAKNTVYLQMNSLRPEDTAVYYCAKGKHSGRYYPWDDYWGQGTQVTVSS

SEQ ID NO: 4537 - protein, 122 aa, synthetic construct
EVQLLESGGGLAQPGGSLRLSCAASGFTFSNYAMSWARQAPGKGLEWVSGIYGDGSGTYYADSVKGRFTISRDNAKNTVYLQMNSLRPEDTAVYYCAKGRGGGSYYPWDDYWGQGTQVTVSS

SEQ ID NO: 4538 - protein, 122 aa, synthetic construct
EVQLLESGGGLAQPGGSLRLSCAASGFTFSNYAMSWVRQAPGKGLEWVSGIYSDGSGTYYADSVKGRFTISRDNAKNTVYLQMNSLRPEDTAVYYCAKGKHSGSYYPWDAYWGQGTQVTVSS

SEQ ID NO: 4539 - protein, 122 aa, synthetic construct
EVQLLESGGGLAQPGGSLRLSCAASGFTFSNYAMSWVRQAPGKGLEWVSGIYSDGSGTYYADSVKGRFTISRDNAKNTVYLQMNSLRPEDTAVYYCAKVKHSGSYYPWDDYWGQGTQVTVSS

SEQ ID NO: 4540 - protein, 122 aa, synthetic construct
EVQLLESGGGLAQPGGSLRLSCAASGFTFSNYAMSWARQAPGKGLEWVSGIYSDSSGTYYADSVKGRFTISRDNAKNTVYLQMNSLRPEDTAVYYCAKGRGGGSYYPFDDYWGQGTQVTVSS

SEQ ID NO: 4541 - protein, 122 aa, synthetic construct
EVQLLESGGGLAQPGGSLRLSCAASGFTFSYYAMSWVRQAPGKGLEWVSGIYSDGSGTYYADSVKGRFTISRDNAKNTVYLQMNSLRPEDTAVYYCATGRHSGSYYPWDDYWGQGTQVTVSS

SEQ ID NO: 4542 - protein, 122 aa, synthetic construct
EVQLLESGGGLAQPGGSLRLSCAASGFTFSNYAMSWVRQAPGKGLEWVSGIYSDGSGTYYADSVKGRFTISRDNAKNTVYLQMNSLRPEDTAVYYCAKGKHSGSYYPWDDHWGQGTQVTVSS

SEQ ID NO: 4543 - protein, 122 aa, synthetic construct
EVQLLESGGGLAQPGGSLRLSCAASGFTFSNYAMSWVRQAPGKGLEWVSGIYSDGSGTYYADSVKGRFTISRDNAKNTVYLQMNSLRPEDTAVYYCAKGKPSGSYYPWDDYWGQGTQVTVSS

SEQ ID NO: 4544 - protein, 122 aa, synthetic construct
EVQLLESGGGLAQPGGSLRLSCAASGFTFSNYAMSWARQAPGKGLEWVSGIYSDGSGTYYADSVKGRFTISRDNAKNTVYLQMNSLRPEDTAVYYCAKGRNSGSYYPFDDYWGQGTQVTVSS

SEQ ID NO: 4545 - protein, 122 aa, synthetic construct
EVQLLESGGGLAQPGGSLRLSCAASGFTFSNYAMSWARQAPGKGLEWVSGIYSDSSGTYYADSVKGRFTISRDNAKNTVYLQMNSLRPEDTAVYYCAKGRGSGSYYPFDAYWGQGTQVTVSS

SEQ ID NO: 4546 - protein, 122 aa, synthetic construct
EVQLLESGGGLAQPGGSLRLSCAASGFTFSNYAMSWARQAPGKGLEWVSGIYSDSSGTYYADSVKGRFTISRDNAKNTVYLQMNSLRPEDTAVYYCAKGRGSGSYYPLDDYWGQGTQVTVSS

SEQ ID NO: 4547 - protein, 122 aa, synthetic construct
EVQLLESGGGLAQPGGSLRLSCAASGFTFSNYAMSWARQAPGKGLEWVSGIYSDSSGTYYADSVKGRFTISRDNAKNTVYLQMNSLRPEDTAVYYCAKGRGSGGYYPFDDYWGQGTQVTVSS

SEQ ID NO: 4548 - protein, 122 aa, synthetic construct
EVQLLESGGGLAQPGGSLRLSCAASGFTFSNYAMSWARQAPGKGLEWVSGIYSDSSGTYYADSVKGRFTISRDNAKNTVYLQMNSLRPEDTAVYYCAKGRGSGSYYPFEDYWGQGTQVTVSS

SEQ ID NO: 4549 - protein, 122 aa, synthetic construct
EVQLLESGGGLAQPGGSLRLSCAASGFTFSNYAMSWARQAPGKGLEWVSGIYSDSSGTYYADSVKGRFTISRDNAKNTVYLQMNSLRPEDTAVYYCAKGRGSGSYYPIDDYWGQGTQVTVSS

SEQ ID NO: 4550 - protein, 122 aa, synthetic construct
EVQLLESGGGLAQPGGSLRLSCAASGFTFSNYAMSWARQAPGKGLEWVSGIYSDSSGTYYADSVKGRFTISRDNAKNTVYLQMNSLRPEDTAVYYCAKGRGRGSYYPFDDYWGQGTQVTVSS

SEQ ID NO: 4551 - protein, 122 aa, synthetic construct
EVQLLESGGGLAQPGGSLRLSCAASGFTFSNYAMSWARQAPGKGLEWVSGIYSDGSGTYYADSVKGRFTISRDNAKNTVYLQMNSLRPEDTAVYYCSKGRGSGSYYPWDDYWGQGTQVTVSS

SEQ ID NO: 4552 - protein, 122 aa, synthetic construct
EVQLLESGGGLAQPGGSLRLSCAASGFTFSNYAMSWARQAPGKGLEWVSGIYSDSSGTYYADSVKGRFTISRDNAKNTVYLQMNSLRPEDTAVYYCAKGRGSGSYDPFDDYWGQGTQVTVSS

SEQ ID NO: 4553 - protein, 122 aa, synthetic construct
EVQLLESGGGLAQPGGSLRLSCAASGFTFSNYAMSWARQAPGKGLEWVSGIYSDSSGTYYADSVKGRFTISRDNAKNTVYLQMNSLRPEDTAVYYCSKGRGSGSYYPFDDYWGQGTQVTVSS

SEQ ID NO: 4554 - protein, 122 aa, synthetic construct
EVQLLESGGGLAQPGGSLRLSCAASGFTFSNYAMSWARQAPGKGLEWVSGIYSDSSGTYYADSVKGRFTISRDNAKNTVYLQMNSLRPEDTAVYYCAKGRGSGSYYPFDVYWGQGTQVTVSS

SEQ ID NO: 4555 - protein, 122 aa, synthetic construct
EVQLLESGGGLAQPGGSLRLSCAASGFTFSNYAMSWARQAPGKGLEWVSGIYSDGSGTYYADSVKGRFTISRDNAKNTVYLQMNSLRPEDTAVYYCEKGRGSGSYYPWDDYWGQGTQVTVSS

SEQ ID NO: 4556 - protein, 122 aa, synthetic construct
EVQLLESGGGLAQPGGSLRLSCAASGFTFSNYAMSWARQAPGKGLEWVSGIYSDSSGTYYADSVKGRFTISRDNAKNTVYLQMNSLRPEDTAVYYCATGRGSGSYYPFDDYWGQGTQVTVSS

SEQ ID NO: 4557 - protein, 122 aa, synthetic construct
EVQLLESGGGLAQPGGSLRLSCAASGFTFSNYAMSWARQAPGKGLEWVSGIYSDSSGTYYADSVKGRFTISRDNAKNTVYLQMNSLRPEDTAVYYCAKGRGSGSYYPFDDHWGQGTQVTVSS

SEQ ID NO: 4558 - protein, 122 aa, synthetic construct
EVQLLESGGGLVQPGGSLRLSCAASGFTFSNYAMSWARQAPGKGLEWVSGIYSDGSGTYYADSVKGRFTISRDNAKNTVYLQMNSLRPEDTAVYYCAKGRNSGSYYPFDDYWGQGTQVTVSS

SEQ ID NO: 4559 - protein, 122 aa, synthetic construct
EVQLLESGGGLAQPGGSLRLSCAASGFTFSNYAMSWTRQAPGKGLEWVSGIYSDGSGTYYADSVKGRFTISRDNAKNTVYLQMNSLRPEDTAVYYCAKGRNSGSYYPFDDYWGQGTQVTVSS

SEQ ID NO: 4560 - protein, 8 aa, synthetic construct
GFTFSYYA

SEQ ID NO: 4561 - protein, 8 aa, synthetic construct
GFTFSNYA

SEQ ID NO: 4562 - protein, 8 aa, synthetic construct
GFTFSNYA

SEQ ID NO: 4563 - protein, 8 aa, synthetic construct
GFTFSNYA

SEQ ID NO: 4564 - protein, 8 aa, synthetic construct
GFTFSNYA

SEQ ID NO: 4565 - protein, 8 aa, synthetic construct
GFTFSNYA

SEQ ID NO: 4566 - protein, 8 aa, synthetic construct
GFTFSNYA

SEQ ID NO: 4567 - protein, 8 aa, synthetic construct
GFTFSNYA

SEQ ID NO: 4568 - protein, 8 aa, synthetic construct
GFTFSNYA

SEQ ID NO: 4569 - protein, 8 aa, synthetic construct
GFTFSNYA

SEQ ID NO: 4570 - protein, 8 aa, synthetic construct
GFTFSNYA

SEQ ID NO: 4571 - protein, 8 aa, synthetic construct
GFTFSNYA

SEQ ID NO: 4572 - protein, 8 aa, synthetic construct
GFTFSNYA

SEQ ID NO: 4573 - protein, 8 aa, synthetic construct
GFTFSNYA

SEQ ID NO: 4574 - protein, 8 aa, synthetic construct
GFTFSNYA

SEQ ID NO: 4575 - protein, 8 aa, synthetic construct
GFTFSNYA

SEQ ID NO: 4576 - protein, 8 aa, synthetic construct
GFTFSNYA

SEQ ID NO: 4577 - protein, 8 aa, synthetic construct
GFTFSNYA

SEQ ID NO: 4578 - protein, 8 aa, synthetic construct
GFTFSNYA

SEQ ID NO: 4579 - protein, 8 aa, synthetic construct
GFTFSNYA

SEQ ID NO: 4580 - protein, 8 aa, synthetic construct
GFTFSNYA

SEQ ID NO: 4581 - protein, 8 aa, synthetic construct
GFTFSNYA

SEQ ID NO: 4582 - protein, 8 aa, synthetic construct
GFTFSNYA

SEQ ID NO: 4583 - protein, 8 aa, synthetic construct
GFTFSNYA

SEQ ID NO: 4584 - protein, 8 aa, synthetic construct
GFTFSNYA

SEQ ID NO: 4585 - protein, 8 aa, synthetic construct
GFTFSNYA

SEQ ID NO: 4586 - protein, 8 aa, synthetic construct
GFTFSNYA

SEQ ID NO: 4587 - protein, 8 aa, synthetic construct
GFTFSDYA

SEQ ID NO: 4588 - protein, 8 aa, synthetic construct
GFTFSNYA

SEQ ID NO: 4589 - protein, 8 aa, synthetic construct
GFTFSNYA

SEQ ID NO: 4590 - protein, 8 aa, synthetic construct
GFTFSNYA

SEQ ID NO: 4591 - protein, 8 aa, synthetic construct
GFTFSNYA

SEQ ID NO: 4592 - protein, 8 aa, synthetic construct
GFTFSNYA

SEQ ID NO: 4593 - protein, 8 aa, synthetic construct
GFTFSNYA

SEQ ID NO: 4594 - protein, 8 aa, synthetic construct
GFTFSNYA

SEQ ID NO: 4595 - protein, 8 aa, synthetic construct
GFTFSNYA

SEQ ID NO: 4596 - protein, 8 aa, synthetic construct
GFTFSNYA

SEQ ID NO: 4597 - protein, 8 aa, synthetic construct
GFTFSNYA

SEQ ID NO: 4598 - protein, 8 aa, synthetic construct
GFTFSNYA

SEQ ID NO: 4599 - protein, 8 aa, synthetic construct
GFTFSSYA

SEQ ID NO: 4600 - protein, 8 aa, synthetic construct
GFTFSNYA

SEQ ID NO: 4601 - protein, 8 aa, synthetic construct
GFTFSNYA

SEQ ID NO: 4602 - protein, 8 aa, synthetic construct
GFTFSNYA

SEQ ID NO: 4603 - protein, 8 aa, synthetic construct
GFTFSNYA

SEQ ID NO: 4604 - protein, 8 aa, synthetic construct
GFTFSNYA

SEQ ID NO: 4605 - protein, 8 aa, synthetic construct
GFTFSNYA

SEQ ID NO: 4606 - protein, 8 aa, synthetic construct
GFTFSNYA

SEQ ID NO: 4607 - protein, 8 aa, synthetic construct
GFTFSNYA

SEQ ID NO: 4608 - protein, 8 aa, synthetic construct
GFTFSNYA

SEQ ID NO: 4609 - protein, 8 aa, synthetic construct
GFTFSNYA

SEQ ID NO: 4610 - protein, 8 aa, synthetic construct
GFTFSNYA

SEQ ID NO: 4611 - protein, 8 aa, synthetic construct
GFTFSNYA

SEQ ID NO: 4612 - protein, 8 aa, synthetic construct
GFTFSNYA

SEQ ID NO: 4613 - protein, 8 aa, synthetic construct
GFTFSNYA

SEQ ID NO: 4614 - protein, 8 aa, synthetic construct
GFTFSNYA

SEQ ID NO: 4615 - protein, 8 aa, synthetic construct
GFTFSNYA

SEQ ID NO: 4616 - protein, 8 aa, synthetic construct
GFTFSNYA

SEQ ID NO: 4617 - protein, 8 aa, synthetic construct
GFTFSNYA

SEQ ID NO: 4618 - protein, 8 aa, synthetic construct
GFTFSNYA

SEQ ID NO: 4619 - protein, 8 aa, synthetic construct
GFTFSNYA

SEQ ID NO: 4620 - protein, 8 aa, synthetic construct
GFTFSNYA

SEQ ID NO: 4621 - protein, 8 aa, synthetic construct
GFTFSIYA

SEQ ID NO: 4622 - protein, 8 aa, synthetic construct
GFTFSIYA

SEQ ID NO: 4623 - protein, 8 aa, synthetic construct
GFTFSYYA

SEQ ID NO: 4624 - protein, 8 aa, synthetic construct
GFTFSNYA

SEQ ID NO: 4625 - protein, 8 aa, synthetic construct
GFTFSNYA

SEQ ID NO: 4626 - protein, 8 aa, synthetic construct
GFTFSNYA

SEQ ID NO: 4627 - protein, 8 aa, synthetic construct
GFTFSNYA

SEQ ID NO: 4628 - protein, 8 aa, synthetic construct
GFTFSNYA

SEQ ID NO: 4629 - protein, 8 aa, synthetic construct
GFTFSNYA

SEQ ID NO: 4630 - protein, 8 aa, synthetic construct
GFTFSNYA

SEQ ID NO: 4631 - protein, 8 aa, synthetic construct
GFTFSNYA

SEQ ID NO: 4632 - protein, 8 aa, synthetic construct
GFTFSNYA

SEQ ID NO: 4633 - protein, 8 aa, synthetic construct
GFTFSNYA

SEQ ID NO: 4634 - protein, 8 aa, synthetic construct
GFTFSNYA

SEQ ID NO: 4635 - protein, 8 aa, synthetic construct
GFTFSNYA

SEQ ID NO: 4636 - protein, 8 aa, synthetic construct
GFTFSNYA

SEQ ID NO: 4637 - protein, 8 aa, synthetic construct
GFTFSNYA

SEQ ID NO: 4638 - protein, 8 aa, synthetic construct
GFTFSNYA

SEQ ID NO: 4639 - protein, 8 aa, synthetic construct
GFTFSNYA

SEQ ID NO: 4640 - protein, 8 aa, synthetic construct
GFTFSNYA

SEQ ID NO: 4641 - protein, 8 aa, synthetic construct
GFTFSNYA

SEQ ID NO: 4642 - protein, 8 aa, synthetic construct
GFTFSNYA

SEQ ID NO: 4643 - protein, 8 aa, synthetic construct
GFTFSNYA

SEQ ID NO: 4644 - protein, 8 aa, synthetic construct
GFTFSNYA

SEQ ID NO: 4645 - protein, 8 aa, synthetic construct
GFTFSNYA

SEQ ID NO: 4646 - protein, 8 aa, synthetic construct
GFTFSNYA

SEQ ID NO: 4647 - protein, 8 aa, synthetic construct
GFTFSNYA

SEQ ID NO: 4648 - protein, 8 aa, synthetic construct
GFTFSNYA

SEQ ID NO: 4649 - protein, 8 aa, synthetic construct
GFTFSNYA

SEQ ID NO: 4650 - protein, 8 aa, synthetic construct
GFTFSNYA

SEQ ID NO: 4651 - protein, 8 aa, synthetic construct
GFTFSYYA

SEQ ID NO: 4652 - protein, 8 aa, synthetic construct
GFTFSNYA

SEQ ID NO: 4653 - protein, 8 aa, synthetic construct
GFTFSNYA

SEQ ID NO: 4654 - protein, 8 aa, synthetic construct
GFTFSNYA

SEQ ID NO: 4655 - protein, 8 aa, synthetic construct
GFTFSNYA

SEQ ID NO: 4656 - protein, 8 aa, synthetic construct
GFTFSNYA

SEQ ID NO: 4657 - protein, 8 aa, synthetic construct
GFTFSNYA

SEQ ID NO: 4658 - protein, 8 aa, synthetic construct
GFTFSNYA

SEQ ID NO: 4659 - protein, 8 aa, synthetic construct
GFTFSNYA

SEQ ID NO: 4660 - protein, 8 aa, synthetic construct
GFTFSNYA

SEQ ID NO: 4661 - protein, 8 aa, synthetic construct
GFTFSNYA

SEQ ID NO: 4662 - protein, 8 aa, synthetic construct
GFTFSNYA

SEQ ID NO: 4663 - protein, 8 aa, synthetic construct
GFTFSNYA

SEQ ID NO: 4664 - protein, 8 aa, synthetic construct
GFTFSNYA

SEQ ID NO: 4665 - protein, 8 aa, synthetic construct
GFTFSNYA

SEQ ID NO: 4666 - protein, 8 aa, synthetic construct
GFTFSNYA

SEQ ID NO: 4667 - protein, 8 aa, synthetic construct
GFTFSNYA

SEQ ID NO: 4668 - protein, 8 aa, synthetic construct
GFTFSNYA

SEQ ID NO: 4669 - protein, 8 aa, synthetic construct
GFTFSNYA

SEQ ID NO: 4670 - protein, 8 aa, synthetic construct
GFTFSNYA

SEQ ID NO: 4671 - protein, 8 aa, synthetic construct
IYSDGSGT

SEQ ID NO: 4672 - protein, 8 aa, synthetic construct
IYSDGSGT

SEQ ID NO: 4673 - protein, 8 aa, synthetic construct
IYSDGSGT

SEQ ID NO: 4674 - protein, 8 aa, synthetic construct
IYSDGSGT

SEQ ID NO: 4675 - protein, 8 aa, synthetic construct
IYSDGSGT

SEQ ID NO: 4676 - protein, 8 aa, synthetic construct
IYSDGSGT

SEQ ID NO: 4677 - protein, 8 aa, synthetic construct
IYSDGSGT

SEQ ID NO: 4678 - protein, 8 aa, synthetic construct
IYSDGSGT

SEQ ID NO: 4679 - protein, 8 aa, synthetic construct
IYSDGSGT

SEQ ID NO: 4680 - protein, 8 aa, synthetic construct
IYSDGSGT

SEQ ID NO: 4681 - protein, 8 aa, synthetic construct
IYSDGSGT

SEQ ID NO: 4682 - protein, 8 aa, synthetic construct
IYSDGSGT

SEQ ID NO: 4683 - protein, 8 aa, synthetic construct
IYSDGSGT

SEQ ID NO: 4684 - protein, 8 aa, synthetic construct
IYSDGSGT

SEQ ID NO: 4685 - protein, 8 aa, synthetic construct
IYSDGSGT

SEQ ID NO: 4686 - protein, 8 aa, synthetic construct
IYSDGSGT

SEQ ID NO: 4687 - protein, 8 aa, synthetic construct
IYSDGSGT

SEQ ID NO: 4688 - protein, 8 aa, synthetic construct
IYSDGSGT

SEQ ID NO: 4689 - protein, 8 aa, synthetic construct
IYSDGSGT

SEQ ID NO: 4690 - protein, 8 aa, synthetic construct
IYSDGSGT

SEQ ID NO: 4691 - protein, 8 aa, synthetic construct
IYSDGSGT

SEQ ID NO: 4692 - protein, 8 aa, synthetic construct
IYSDGSGT

SEQ ID NO: 4693 - protein, 8 aa, synthetic construct
IYSDGSGT

SEQ ID NO: 4694 - protein, 8 aa, synthetic construct
IYSDGSGT

SEQ ID NO: 4695 - protein, 8 aa, synthetic construct
IYSDGSGT

SEQ ID NO: 4696 - protein, 8 aa, synthetic construct
IYSDGSGT

SEQ ID NO: 4697 - protein, 8 aa, synthetic construct
IYSDGSGT

SEQ ID NO: 4698 - protein, 8 aa, synthetic construct
IYSDGSGT

SEQ ID NO: 4699 - protein, 8 aa, synthetic construct
IYSDGSGT

SEQ ID NO: 4700 - protein, 8 aa, synthetic construct
IYSDGSGT

SEQ ID NO: 4701 - protein, 8 aa, synthetic construct
IYSDGSGT

SEQ ID NO: 4702 - protein, 8 aa, synthetic construct
IYSDGSGT

SEQ ID NO: 4703 - protein, 8 aa, synthetic construct
IYSDGSGT

SEQ ID NO: 4704 - protein, 8 aa, synthetic construct
IYSDGSGT

SEQ ID NO: 4705 - protein, 8 aa, synthetic construct
IYSDGSGT

SEQ ID NO: 4706 - protein, 8 aa, synthetic construct
IYSDSSAT

SEQ ID NO: 4707 - protein, 8 aa, synthetic construct
IYSDGSGT

SEQ ID NO: 4708 - protein, 8 aa, synthetic construct
IYSDGSGT

SEQ ID NO: 4709 - protein, 8 aa, synthetic construct
IYSDGSDT

SEQ ID NO: 4710 - protein, 8 aa, synthetic construct
IYSDGSDT

SEQ ID NO: 4711 - protein, 8 aa, synthetic construct
IYSDGSGT

SEQ ID NO: 4712 - protein, 8 aa, synthetic construct
IYSDGSGT

SEQ ID NO: 4713 - protein, 8 aa, synthetic construct
IYSDGSGT

SEQ ID NO: 4714 - protein, 8 aa, synthetic construct
IYSDGSGT

SEQ ID NO: 4715 - protein, 8 aa, synthetic construct
IYSDGSGT

SEQ ID NO: 4716 - protein, 8 aa, synthetic construct
IYSDGSGT

SEQ ID NO: 4717 - protein, 8 aa, synthetic construct
IYSDGSGT

SEQ ID NO: 4718 - protein, 8 aa, synthetic construct
IYSDGSGT

SEQ ID NO: 4719 - protein, 8 aa, synthetic construct
IYSDGSGT

SEQ ID NO: 4720 - protein, 8 aa, synthetic construct
IYSDGSGT

SEQ ID NO: 4721 - protein, 8 aa, synthetic construct
IYSDSSAT

SEQ ID NO: 4722 - protein, 8 aa, synthetic construct
IYSDGSGT

SEQ ID NO: 4723 - protein, 8 aa, synthetic construct
IYSDGSGT

SEQ ID NO: 4724 - protein, 8 aa, synthetic construct
IYSDSSAT

SEQ ID NO: 4725 - protein, 8 aa, synthetic construct
IYSDGSGT

SEQ ID NO: 4726 - protein, 8 aa, synthetic construct
IYSDGSGT

SEQ ID NO: 4727 - protein, 8 aa, synthetic construct
IYSDGSGT

SEQ ID NO: 4728 - protein, 8 aa, synthetic construct
IYSDGSDT

SEQ ID NO: 4729 - protein, 8 aa, synthetic construct
IYSDGSGT

SEQ ID NO: 4730 - protein, 8 aa, synthetic construct
IYSDGSGT

SEQ ID NO: 4731 - protein, 8 aa, synthetic construct
IYSDGSGT

SEQ ID NO: 4732 - protein, 8 aa, synthetic construct
IYSDGSNT

SEQ ID NO: 4733 - protein, 8 aa, synthetic construct
IYSDGSNT

SEQ ID NO: 4734 - protein, 8 aa, synthetic construct
IYSDGSGT

SEQ ID NO: 4735 - protein, 8 aa, synthetic construct
IYSDGSGT

SEQ ID NO: 4736 - protein, 8 aa, synthetic construct
IYSDGSGT

SEQ ID NO: 4737 - protein, 8 aa, synthetic construct
IYSDGSGT

SEQ ID NO: 4738 - protein, 8 aa, synthetic construct
IYSDGSGT

SEQ ID NO: 4739 - protein, 8 aa, synthetic construct
IYSDGSGT

SEQ ID NO: 4740 - protein, 8 aa, synthetic construct
IYSDGSGT

SEQ ID NO: 4741 - protein, 8 aa, synthetic construct
IYSDGSGT

SEQ ID NO: 4742 - protein, 8 aa, synthetic construct
IYSDGRGT

SEQ ID NO: 4743 - protein, 8 aa, synthetic construct
IYSDGSGT

SEQ ID NO: 4744 - protein, 8 aa, synthetic construct
IYSDGSGT

SEQ ID NO: 4745 - protein, 8 aa, synthetic construct
IYSDGSGT

SEQ ID NO: 4746 - protein, 8 aa, synthetic construct
IYSDGSGT

SEQ ID NO: 4747 - protein, 8 aa, synthetic construct
IYSDGSGT

SEQ ID NO: 4748 - protein, 8 aa, synthetic construct
IYSDGSGT

SEQ ID NO: 4749 - protein, 8 aa, synthetic construct
IYSDGSGT

SEQ ID NO: 4750 - protein, 8 aa, synthetic construct
IYSDGSGT

SEQ ID NO: 4751 - protein, 8 aa, synthetic construct
IYSDGSGT

SEQ ID NO: 4752 - protein, 8 aa, synthetic construct
IYSDGSGT

SEQ ID NO: 4753 - protein, 8 aa, synthetic construct
IYSDGSGT

SEQ ID NO: 4754 - protein, 8 aa, synthetic construct
IYSDGSGT

SEQ ID NO: 4755 - protein, 8 aa, synthetic construct
IYSDGSGT

SEQ ID NO: 4756 - protein, 8 aa, synthetic construct
IYSDGSGT

SEQ ID NO: 4757 - protein, 8 aa, synthetic construct
IYSDGSGT

SEQ ID NO: 4758 - protein, 8 aa, synthetic construct
IYGDGSGT

SEQ ID NO: 4759 - protein, 8 aa, synthetic construct
IYSDGSGT

SEQ ID NO: 4760 - protein, 8 aa, synthetic construct
IYSDGSGT

SEQ ID NO: 4761 - protein, 8 aa, synthetic construct
IYSDSSGT

SEQ ID NO: 4762 - protein, 8 aa, synthetic construct
IYSDGSGT

SEQ ID NO: 4763 - protein, 8 aa, synthetic construct
IYSDGSGT

SEQ ID NO: 4764 - protein, 8 aa, synthetic construct
IYSDGSGT

SEQ ID NO: 4765 - protein, 8 aa, synthetic construct
IYSDGSGT

SEQ ID NO: 4766 - protein, 8 aa, synthetic construct
IYSDSSGT

SEQ ID NO: 4767 - protein, 8 aa, synthetic construct
IYSDSSGT

SEQ ID NO: 4768 - protein, 8 aa, synthetic construct
IYSDSSGT

SEQ ID NO: 4769 - protein, 8 aa, synthetic construct
IYSDSSGT

SEQ ID NO: 4770 - protein, 8 aa, synthetic construct
IYSDSSGT

SEQ ID NO: 4771 - protein, 8 aa, synthetic construct
IYSDSSGT

SEQ ID NO: 4772 - protein, 8 aa, synthetic construct
IYSDSSGT

SEQ ID NO: 4773 - protein, 8 aa, synthetic construct
IYSDGSGT

SEQ ID NO: 4774 - protein, 8 aa, synthetic construct
IYSDSSGT

SEQ ID NO: 4775 - protein, 8 aa, synthetic construct
IYSDSSGT

SEQ ID NO: 4776 - protein, 8 aa, synthetic construct
IYSDSSGT

SEQ ID NO: 4777 - protein, 8 aa, synthetic construct
IYSDGSGT

SEQ ID NO: 4778 - protein, 8 aa, synthetic construct
IYSDSSGT

SEQ ID NO: 4779 - protein, 8 aa, synthetic construct
IYSDSSGT

SEQ ID NO: 4780 - protein, 8 aa, synthetic construct
IYSDGSGT

SEQ ID NO: 4781 - protein, 15 aa, synthetic construct
AKGARSGSYYPWDDY

SEQ ID NO: 4782 - protein, 15 aa, synthetic construct
AKGARSGSYYPWDDY

SEQ ID NO: 4783 - protein, 15 aa, synthetic construct
AKGARSGSYYPWDDV

SEQ ID NO: 4784 - protein, 15 aa, synthetic construct
AKGAGSGSYYPWDDV

SEQ ID NO: 4785 - protein, 15 aa, synthetic construct
AKGAGSGSYYPWDDV

SEQ ID NO: 4786 - protein, 15 aa, synthetic construct
AKGARSGSYDPWDDV

SEQ ID NO: 4787 - protein, 15 aa, synthetic construct
SKGARSGSYYPWDDV

SEQ ID NO: 4788 - protein, 15 aa, synthetic construct
AKGASSGSYYPWDDV

SEQ ID NO: 4789 - protein, 15 aa, synthetic construct
AKGARSGSYYPWDGV

SEQ ID NO: 4790 - protein, 15 aa, synthetic construct
AQGARSGSYYPWDDV

SEQ ID NO: 4791 - protein, 15 aa, synthetic construct
ATGARSGSYYPWDDV

SEQ ID NO: 4792 - protein, 15 aa, synthetic construct
AKGDRSGSYYPWDDV

SEQ ID NO: 4793 - protein, 15 aa, synthetic construct
AKGSRSGSYYPWDDV

SEQ ID NO: 4794 - protein, 15 aa, synthetic construct
AKGARSGSYYPWDNV

SEQ ID NO: 4795 - protein, 15 aa, synthetic construct
AKGARRGSYYPWDDV

SEQ ID NO: 4796 - protein, 15 aa, synthetic construct
VKGARSGSYYPWDDV

SEQ ID NO: 4797 - protein, 15 aa, synthetic construct
AKGARSGSYYPWYDV

SEQ ID NO: 4798 - protein, 15 aa, synthetic construct
TKGARSGSYYPWDDV

SEQ ID NO: 4799 - protein, 15 aa, synthetic construct
AKGARSGIYYPWDDV

SEQ ID NO: 4800 - protein, 15 aa, synthetic construct
AKGARSGSDYPWDDV

SEQ ID NO: 4801 - protein, 15 aa, synthetic construct
AKGARSGSYYPWDVV

SEQ ID NO: 4802 - protein, 15 aa, synthetic construct
AKGARGGSYYPWDDV

SEQ ID NO: 4803 - protein, 15 aa, synthetic construct
AKGARSGSYDPWDDV

SEQ ID NO: 4804 - protein, 15 aa, synthetic construct
AKGARSGRYYPWDDV

SEQ ID NO: 4805 - protein, 15 aa, synthetic construct
EKGARSGSYYPWDDV

SEQ ID NO: 4806 - protein, 15 aa, synthetic construct
AKGARSGSYDPWDDV

SEQ ID NO: 4807 - protein, 15 aa, synthetic construct
AMGARSGSYYPWDDV

SEQ ID NO: 4808 - protein, 15 aa, synthetic construct
AKGVRSGSYYPWDDV

SEQ ID NO: 4809 - protein, 15 aa, synthetic construct
AKGARSGSYYPLDDV

SEQ ID NO: 4810 - protein, 15 aa, synthetic construct
AKGARSGSSYPWDDV

SEQ ID NO: 4811 - protein, 15 aa, synthetic construct
AKVARSGSYYPWDDV

SEQ ID NO: 4812 - protein, 15 aa, synthetic construct
AKGARSGSYYHWDDV

SEQ ID NO: 4813 - protein, 15 aa, synthetic construct
AKGARSGGYYPWDDV

SEQ ID NO: 4814 - protein, 15 aa, synthetic construct
AKGARSGSYYPWDGV

SEQ ID NO: 4815 - protein, 15 aa, synthetic construct
AKGLNSGSYYPWDDN

SEQ ID NO: 4816 - protein, 15 aa, synthetic construct
AKGLNSGSYYPWDDY

SEQ ID NO: 4817 - protein, 15 aa, synthetic construct
AKGLNSGSYYPWDDY

SEQ ID NO: 4818 - protein, 15 aa, synthetic construct
AKGRNSGSYYPWDDH

SEQ ID NO: 4819 - protein, 15 aa, synthetic construct
LKGKNSGSYYPWDDY

SEQ ID NO: 4820 - protein, 15 aa, synthetic construct
VKGKNSGSYYPWDDY

SEQ ID NO: 4821 - protein, 15 aa, synthetic construct
ANGRNSGSYYPWDDY

SEQ ID NO: 4822 - protein, 15 aa, synthetic construct
AKGLNSGGYYPWDDN

SEQ ID NO: 4823 - protein, 15 aa, synthetic construct
AKGLNRGSYYPWDDN

SEQ ID NO: 4824 - protein, 15 aa, synthetic construct
AKGLSSGSYYPWDDN

SEQ ID NO: 4825 - protein, 15 aa, synthetic construct
AKGLNSGSYDPWDDN

SEQ ID NO: 4826 - protein, 15 aa, synthetic construct
AKGRNSGSYYPWDDF

SEQ ID NO: 4827 - protein, 15 aa, synthetic construct
AKGLKSGSYYPWDDN

SEQ ID NO: 4828 - protein, 15 aa, synthetic construct
ATGLNSGSYYPWDDN

SEQ ID NO: 4829 - protein, 15 aa, synthetic construct
AKGLNSGSYYPWDDN

SEQ ID NO: 4830 - protein, 15 aa, synthetic construct
AKGLNSGSYYPWDDN

SEQ ID NO: 4831 - protein, 15 aa, synthetic construct
AKGLNSGSYYPWDGY

SEQ ID NO: 4832 - protein, 15 aa, synthetic construct
AKGLNSGSYYPWDVY

SEQ ID NO: 4833 - protein, 15 aa, synthetic construct
AKGLNSGSYYPWYDY

SEQ ID NO: 4834 - protein, 15 aa, synthetic construct
AKGLNSGSYYPWDVY

SEQ ID NO: 4835 - protein, 15 aa, synthetic construct
AKGSNSGSYYPLDDY

SEQ ID NO: 4836 - protein, 15 aa, synthetic construct
AKGLNSGRYYPWDDN

SEQ ID NO: 4837 - protein, 15 aa, synthetic construct
AKGRNSGSYYPWDDH

SEQ ID NO: 4838 - protein, 15 aa, synthetic construct
LKGKNSGSYYPWDDY

SEQ ID NO: 4839 - protein, 15 aa, synthetic construct
ANGRNSGSYYPWDDY

SEQ ID NO: 4840 - protein, 15 aa, synthetic construct
GKGLHSGSYYPFDDY

SEQ ID NO: 4841 - protein, 15 aa, synthetic construct
GKGLHSGSYYPFDDY

SEQ ID NO: 4842 - protein, 15 aa, synthetic construct
LKGRHSGSYYPWDDY

SEQ ID NO: 4843 - protein, 15 aa, synthetic construct
LKGRHSGSYYPWDDY

SEQ ID NO: 4844 - protein, 15 aa, synthetic construct
VKGRHSGSYYPWDDY

SEQ ID NO: 4845 - protein, 15 aa, synthetic construct
GKGLHSGSYYPFDDY

SEQ ID NO: 4846 - protein, 15 aa, synthetic construct
IKARNSGSYYPWDDY

SEQ ID NO: 4847 - protein, 15 aa, synthetic construct
IKARNSGSYYPWDDY

SEQ ID NO: 4848 - protein, 15 aa, synthetic construct
ATGRNSGSYYPWDDY

SEQ ID NO: 4849 - protein, 15 aa, synthetic construct
TKGRNSGSYYPWDDY

SEQ ID NO: 4850 - protein, 15 aa, synthetic construct
SKGRNSGSYYPWDDY

SEQ ID NO: 4851 - protein, 15 aa, synthetic construct
AKWRNSGSYYPWDDY

SEQ ID NO: 4852 - protein, 15 aa, synthetic construct
LKGRNSGSYYPWDDY

SEQ ID NO: 4853 - protein, 15 aa, synthetic construct
IKARNSGSYDPWDDH

SEQ ID NO: 4854 - protein, 15 aa, synthetic construct
KKARNSGSYYPWDDS

SEQ ID NO: 4855 - protein, 15 aa, synthetic construct
AIGRNSGSYYPWDDY

SEQ ID NO: 4856 - protein, 15 aa, synthetic construct
EKGRNSGSYYPWDDY

SEQ ID NO: 4857 - protein, 15 aa, synthetic construct
AKAKHSGSYYPWDDY

SEQ ID NO: 4858 - protein, 15 aa, synthetic construct
ITARNSGSYYPWDDH

SEQ ID NO: 4859 - protein, 15 aa, synthetic construct
AKGKQSGSYYPWDDY

SEQ ID NO: 4860 - protein, 15 aa, synthetic construct
AKGRNGGSYYPWDDY

SEQ ID NO: 4861 - protein, 15 aa, synthetic construct
AKGKHGGSYYPWDDY

SEQ ID NO: 4862 - protein, 15 aa, synthetic construct
AKGKHSGSYDPWDDY

SEQ ID NO: 4863 - protein, 15 aa, synthetic construct
AKGKHSGSYYPWDGY

SEQ ID NO: 4864 - protein, 15 aa, synthetic construct
ANGKHSGSYYPWDDY

SEQ ID NO: 4865 - protein, 15 aa, synthetic construct
AKGKHRGSYYPWDDY

SEQ ID NO: 4866 - protein, 15 aa, synthetic construct
ATGKHSGSYYPWDDY

SEQ ID NO: 4867 - protein, 15 aa, synthetic construct
AKGKHSGRYYPWDDY

SEQ ID NO: 4868 - protein, 15 aa, synthetic construct
AKGRGGGSYYPWDDY

SEQ ID NO: 4869 - protein, 15 aa, synthetic construct
AKGKHSGSYYPWDAY

SEQ ID NO: 4870 - protein, 15 aa, synthetic construct
AKVKHSGSYYPWDDY

SEQ ID NO: 4871 - protein, 15 aa, synthetic construct
AKGRGGGSYYPFDDY

SEQ ID NO: 4872 - protein, 15 aa, synthetic construct
ATGRHSGSYYPWDDY

SEQ ID NO: 4873 - protein, 15 aa, synthetic construct
AKGKHSGSYYPWDDH

SEQ ID NO: 4874 - protein, 15 aa, synthetic construct
AKGKPSGSYYPWDDY

SEQ ID NO: 4875 - protein, 15 aa, synthetic construct
AKGRNSGSYYPFDDY

SEQ ID NO: 4876 - protein, 15 aa, synthetic construct
AKGRGSGSYYPFDAY

SEQ ID NO: 4877 - protein, 15 aa, synthetic construct
VKGRGSGSYYPFDDY

SEQ ID NO: 4878 - protein, 15 aa, synthetic construct
AKGRGSGSYYPLDDY

SEQ ID NO: 4879 - protein, 15 aa, synthetic construct
AKGRGSGGYYPFDDY

SEQ ID NO: 4880 - protein, 15 aa, synthetic construct
AKGRGSGSYYPFEDY

SEQ ID NO: 4881 - protein, 15 aa, synthetic construct
AKGRGSGSYYPIDDY

SEQ ID NO: 4882 - protein, 15 aa, synthetic construct
AKGRGRGSYYPFDDY

SEQ ID NO: 4883 - protein, 15 aa, synthetic construct
SKGRGSGSYYPWDDY

SEQ ID NO: 4884 - protein, 15 aa, synthetic construct
AKGRGSGSYDPFDDY

SEQ ID NO: 4885 - protein, 15 aa, synthetic construct
SKGRGSGSYYPFDDY

SEQ ID NO: 4886 - protein, 15 aa, synthetic construct
AKGRGSGSYYPFDVY

SEQ ID NO: 4887 - protein, 15 aa, synthetic construct
EKGRGSGSYYPWDDY

SEQ ID NO: 4888 - protein, 15 aa, synthetic construct
ATGRGSGSYYPFDDY

SEQ ID NO: 4889 - protein, 15 aa, synthetic construct
AKGRGSGSYYPFDDH

SEQ ID NO: 4890 - protein, 15 aa, synthetic construct
AKGRNSGSYYPFDDY

SEQ ID NO: 4891 - protein, 15 aa, synthetic construct
AKGRNSGSYYPFDDY

SEQ ID NO: 4892 - protein, 122 aa, synthetic construct; identical to SEQ ID NO: 4342

SEQ ID NO: 4893 - protein, 122 aa, synthetic construct; identical to SEQ ID NO: 4343

SEQ ID NO: 4894 - protein, 122 aa, synthetic construct; identical to SEQ ID NO: 4344

SEQ ID NO: 4895 - protein, 122 aa, synthetic construct; identical to SEQ ID NO: 4345

SEQ ID NO: 4896 - protein, 122 aa, synthetic construct; identical to SEQ ID NO: 4346

SEQ ID NO: 4897 - protein, 122 aa, synthetic construct; identical to SEQ ID NO: 4347

SEQ ID NO: 4898 - protein, 122 aa, synthetic construct; identical to SEQ ID NO: 4348

SEQ ID NO: 4899 - protein, 122 aa, synthetic construct; identical to SEQ ID NO: 4349

SEQ ID NO: 4900 - protein, 122 aa, synthetic construct; identical to SEQ ID NO: 4350

SEQ ID NO: 4901 - protein, 122 aa, synthetic construct; identical to SEQ ID NO: 4351

SEQ ID NO: 4902 - protein, 122 aa, synthetic construct; identical to SEQ ID NO: 4352

SEQ ID NO: 4903 - protein, 122 aa, synthetic construct; identical to SEQ ID NO: 4353

SEQ ID NO: 4904 - protein, 122 aa, synthetic construct; identical to SEQ ID NO: 4354

SEQ ID NO: 4905 - protein, 122 aa, synthetic construct; identical to SEQ ID NO: 4355

SEQ ID NO: 4906 - protein, 122 aa, synthetic construct; identical to SEQ ID NO: 4356

SEQ ID NO: 4907 - protein, 122 aa, synthetic construct; identical to SEQ ID NO: 4357

SEQ ID NO: 4908 - protein, 122 aa, synthetic construct; identical to SEQ ID NO: 4358

SEQ ID NO: 4909 - protein, 122 aa, synthetic construct; identical to SEQ ID NO: 4359

SEQ ID NO: 4910 - protein, 122 aa, synthetic construct; identical to SEQ ID NO: 4360

SEQ ID NO: 4911 - protein, 122 aa, synthetic construct; identical to SEQ ID NO: 4361

SEQ ID NO: 4912 - protein, 122 aa, synthetic construct; identical to SEQ ID NO: 4362

SEQ ID NO: 4913 - protein, 122 aa, synthetic construct; identical to SEQ ID NO: 4363

SEQ ID NO: 4914 - protein, 122 aa, synthetic construct; identical to SEQ ID NO: 4364

SEQ ID NO: 4915 - protein, 122 aa, synthetic construct; identical to SEQ ID NO: 4365

SEQ ID NO: 4916 - protein, 122 aa, synthetic construct; identical to SEQ ID NO: 4366

SEQ ID NO: 4917 - protein, 122 aa, synthetic construct; identical to SEQ ID NO: 4367

SEQ ID NO: 4918 - protein, 122 aa, synthetic construct; identical to SEQ ID NO: 4368

SEQ ID NO: 4919 - protein, 122 aa, synthetic construct; identical to SEQ ID NO: 4369

SEQ ID NO: 4920 - protein, 122 aa, synthetic construct; identical to SEQ ID NO: 4370

SEQ ID NO: 4921 - protein, 122 aa, synthetic construct; identical to SEQ ID NO: 4371

SEQ ID NO: 4922 - protein, 122 aa, synthetic construct; identical to SEQ ID NO: 4372

SEQ ID NO: 4923 - protein, 122 aa, synthetic construct; identical to SEQ ID NO: 4373

SEQ ID NO: 4924 - protein, 122 aa, synthetic construct; identical to SEQ ID NO: 4374

SEQ ID NO: 4925 - protein, 122 aa, synthetic construct; identical to SEQ ID NO: 4375

SEQ ID NO: 4926 - protein, 122 aa, synthetic construct; identical to SEQ ID NO: 4376

SEQ ID NO: 4927 - protein, 122 aa, synthetic construct; identical to SEQ ID NO: 4377

SEQ ID NO: 4928 - protein, 122 aa, synthetic construct; identical to SEQ ID NO: 4378

SEQ ID NO: 4929 - protein, 122 aa, synthetic construct; identical to SEQ ID NO: 4379

SEQ ID NO: 4930 - protein, 122 aa, synthetic construct; identical to SEQ ID NO: 4380

SEQ ID NO: 4931 - protein, 122 aa, synthetic construct; identical to SEQ ID NO: 4381

SEQ ID NO: 4932 - protein, 122 aa, synthetic construct; identical to SEQ ID NO: 4382

SEQ ID NO: 4933 - protein, 122 aa, synthetic construct; identical to SEQ ID NO: 4383

SEQ ID NO: 4934 - protein, 122 aa, synthetic construct; identical to SEQ ID NO: 4384

SEQ ID NO: 4935 - protein, 122 aa, synthetic construct; identical to SEQ ID NO: 4385

SEQ ID NO: 4936 - protein, 122 aa, synthetic construct; identical to SEQ ID NO: 4386

SEQ ID NO: 4937 - protein, 122 aa, synthetic construct; identical to SEQ ID NO: 4387

SEQ ID NO: 4938 - protein, 122 aa, synthetic construct; identical to SEQ ID NO: 4388

SEQ ID NO: 4939 - protein, 122 aa, synthetic construct; identical to SEQ ID NO: 4389

SEQ ID NO: 4940 - protein, 122 aa, synthetic construct; identical to SEQ ID NO: 4390

SEQ ID NO: 4941 - protein, 122 aa, synthetic construct; identical to SEQ ID NO: 4391

SEQ ID NO: 4942 - protein, 122 aa, synthetic construct; identical to SEQ ID NO: 4392

SEQ ID NO: 4943 - protein, 122 aa, synthetic construct; identical to SEQ ID NO: 4393

SEQ ID NO: 4944 - protein, 122 aa, synthetic construct; identical to SEQ ID NO: 4394

SEQ ID NO: 4945 - protein, 122 aa, synthetic construct; identical to SEQ ID NO: 4395

SEQ ID NO: 4946 - protein, 122 aa, synthetic construct; identical to SEQ ID NO: 4396

SEQ ID NO: 4947 - protein, 122 aa, synthetic construct; identical to SEQ ID NO: 4397

SEQ ID NO: 4948 - protein, 122 aa, synthetic construct; identical to SEQ ID NO: 4398

SEQ ID NO: 4949 - protein, 122 aa, synthetic construct; identical to SEQ ID NO: 4399

SEQ ID NO: 4950 - protein, 122 aa, synthetic construct; identical to SEQ ID NO: 4400

SEQ ID NO: 4951 - protein, 122 aa, synthetic construct; identical to SEQ ID NO: 4401

SEQ ID NO: 4952 - protein, 122 aa, synthetic construct; identical to SEQ ID NO: 4402

SEQ ID NO: 4953 - protein, 122 aa, synthetic construct; identical to SEQ ID NO: 4403

SEQ ID NO: 4954 - protein, 122 aa, synthetic construct; identical to SEQ ID NO: 4404

SEQ ID NO: 4955 - protein, 122 aa, synthetic construct; identical to SEQ ID NO: 4405

SEQ ID NO: 4956 - protein, 122 aa, synthetic construct; identical to SEQ ID NO: 4406

SEQ ID NO: 4957 - protein, 122 aa, synthetic construct; identical to SEQ ID NO: 4407

SEQ ID NO: 4958 - protein, 122 aa, synthetic construct; identical to SEQ ID NO: 4408

SEQ ID NO: 4959 - protein, 122 aa, synthetic construct; identical to SEQ ID NO: 4409

SEQ ID NO: 4960 - protein, 122 aa, synthetic construct; identical to SEQ ID NO: 4410

SEQ ID NO: 4961 - protein, 122 aa, synthetic construct; identical to SEQ ID NO: 4411

SEQ ID NO: 4962 - protein, 122 aa, synthetic construct; identical to SEQ ID NO: 4412

SEQ ID NO: 4963 - protein, 122 aa, synthetic construct; identical to SEQ ID NO: 4413

SEQ ID NO: 4964 - protein, 122 aa, synthetic construct; identical to SEQ ID NO: 4414

SEQ ID NO: 4965 - protein, 122 aa, synthetic construct; identical to SEQ ID NO: 4415

SEQ ID NO: 4966 - protein, 122 aa, synthetic construct; identical to SEQ ID NO: 4416

SEQ ID NO: 4967 - protein, 122 aa, synthetic construct; identical to SEQ ID NO: 4417

SEQ ID NO: 4968 - protein, 122 aa, synthetic construct; identical to SEQ ID NO: 4418

SEQ ID NO: 4969 - protein, 122 aa, synthetic construct; identical to SEQ ID NO: 4419

SEQ ID NO: 4970 - protein, 122 aa, synthetic construct; identical to SEQ ID NO: 4420

SEQ ID NO: 4971 - protein, 122 aa, synthetic construct; identical to SEQ ID NO: 4421

SEQ ID NO: 4972 - protein, 122 aa, synthetic construct; identical to SEQ ID NO: 4422

SEQ ID NO: 4973 - protein, 122 aa, synthetic construct; identical to SEQ ID NO: 4423

SEQ ID NO: 4974 - protein, 122 aa, synthetic construct; identical to SEQ ID NO: 4424

SEQ ID NO: 4975 - protein, 122 aa, synthetic construct; identical to SEQ ID NO: 4425

SEQ ID NO: 4976 - protein, 122 aa, synthetic construct; identical to SEQ ID NO: 4426

SEQ ID NO: 4977 - protein, 122 aa, synthetic construct; identical to SEQ ID NO: 4427

SEQ ID NO: 4978 - protein, 122 aa, synthetic construct; identical to SEQ ID NO: 4428

SEQ ID NO: 4979 - protein, 122 aa, synthetic construct; identical to SEQ ID NO: 4429

SEQ ID NO: 4980 - protein, 122 aa, synthetic construct; identical to SEQ ID NO: 4430

SEQ ID NO: 4981 - protein, 122 aa, synthetic construct; identical to SEQ ID NO: 4431

SEQ ID NO: 4982 - protein, 122 aa, synthetic construct; identical to SEQ ID NO: 4432

SEQ ID NO: 4983 - protein, 122 aa, synthetic construct; identical to SEQ ID NO: 4433

SEQ ID NO: 4984 - protein, 122 aa, synthetic construct; identical to SEQ ID NO: 4434

SEQ ID NO: 4985 - protein, 122 aa, synthetic construct; identical to SEQ ID NO: 4435

SEQ ID NO: 4986 - protein, 122 aa, synthetic construct; identical to SEQ ID NO: 4436

SEQ ID NO: 4987 - protein, 122 aa, synthetic construct; identical to SEQ ID NO: 4437

SEQ ID NO: 4988 - protein, 122 aa, synthetic construct; identical to SEQ ID NO: 4337

SEQ ID NO: 4989 - protein, 122 aa, synthetic construct; identical to SEQ ID NO: 4438

SEQ ID NO: 4990 - protein, 122 aa, synthetic construct; identical to SEQ ID NO: 4439

SEQ ID NO: 4991 - protein, 122 aa, synthetic construct; identical to SEQ ID NO: 4440

SEQ ID NO: 4992 - protein, 122 aa, synthetic construct; identical to SEQ ID NO: 4441

SEQ ID NO: 4993 - protein, 122 aa, synthetic construct; identical to SEQ ID NO: 4442

SEQ ID NO: 4994 - protein, 122 aa, synthetic construct; identical to SEQ ID NO: 4443

SEQ ID NO: 4995 - protein, 122 aa, synthetic construct; identical to SEQ ID NO: 4444

SEQ ID NO: 4996 - protein, 122 aa, synthetic construct; identical to SEQ ID NO: 4445

SEQ ID NO: 4997 - protein, 122 aa, synthetic construct; identical to SEQ ID NO: 4446

SEQ ID NO: 4998 - protein, 122 aa, synthetic construct; identical to SEQ ID NO: 4447

SEQ ID NO: 4999 - protein, 122 aa, synthetic construct; identical to SEQ ID NO: 4448

SEQ ID NO: 5000 - protein, 122 aa, synthetic construct; identical to SEQ ID NO: 4449

SEQ ID NO: 5001 - protein, 122 aa, synthetic construct; identical to SEQ ID NO: 4450

SEQ ID NO: 5002 - protein, 122 aa, synthetic construct; identical to SEQ ID NO: 4451

SEQ ID NO: 5003 - DNA, 366 bp, synthetic construct
  source 1..366: mol_type = other DNA
gaggtgcagctggtggagtctgggggaggcttggcgcagcctggggggtctctgagactctcctgtgcagcctctggattcaccttcagttactatgccatgagctgggcccgccaggctccaggaaaggggctcgagtgggtggccggtatttatagtgatggtagtggcacatactatgcagactccgtgaagggccgattcaccatctccagagacaacgccaagaacacggtgtatctgcaaatgaacagcctgaaacctgaggacacggcactgtattactgtgcaaagggggctagaagtggtagttactacccctgggatgactactggggccaggggacccaggtcaccgtctcctca

SEQ ID NO: 5004 - DNA, 366 bp, synthetic construct
  source 1..366: mol_type = other DNA
gaggtgcagctggtggagtctgggggaggcttggcgcagcctggggggtctctgagactctcctgtgcagcctctggattcaccttcagtaactatgccatgagctgggcccgccaggctccaggaaaggggctcgagtgggtgtccggtatttatagtgatggtagtggcacatactatgcagactccgtgaagggccgattcaccatctccagagacaacgccaagaacacggtgtatctgcaaatgaacagcctgaaacctgaggacacgggactgtattactgtgcaaagggggctagaagtggtagttactacccctgggatgactactggggccaggggacccaggtcaccgtctcctca

SEQ ID NO: 5005 - DNA, 366 bp, synthetic construct
  source 1..366: mol_type = other DNA
gaggtgcagctggtggagtctgggggaggcttggcgcagcctggggggtctctgagactctcctgtgcagcctctggattcaccttcagtaactatgccatgagctgggcccgccaggctccaggaaaggggctcgagtgggtgtccggtatttatagtgatggtagcggcacatactatgcagactccgtgaagggccgattcaccatctccagagacaacgccaagaacacggtgtatctgcaaatgagcagcctgaaacctgaggacacggcactgtattactgtgcaaagggggctagaagtggtagttactacccctgggatgacgtctggggccaggggacccaggtcaccgtctcctca

SEQ ID NO: 5006 - DNA, 366 bp, synthetic construct
  source 1..366: mol_type = other DNA
gaggtgcagctggtggagtctgggggaggcttggtgcagcctggggggtctctgagactctcctgtgcagcctctggattcaccttcagtaactatgccatgagctgggcccgccaggctccaggaaaggggctcgagtgggtgtccggtatttatagtgatggtagcggcacatactatgcagactccgtgaagggccgattcaccatctccagagacaacgccaagaacacggtgtatctgcaaatgagcagcctgaaacctgaggacacggcactgtattactgtgcaaagggggctggaagtggtagttactacccctgggatgacgtctggggccaggggacccaggtcaccgtctcctca

SEQ ID NO: 5007 - DNA, 366 bp, synthetic construct
  source 1..366: mol_type = other DNA
gaggtgcagctggtggagtctgggggaggcttggcgcagcctggggggtctctgagactctcctgtgcagcctctggattcaccttcagtaactatgccatgagctgggcccgccaggctccaggaaaggggctcgagtgggtgtccggtatttatagtgatggtagcggcacatactatgcagactccgtgaagggccgattcaccatctccagagacaacgccaagaacacggtgtatctgcaaatgagcagcctgaaacctgaggacacggcactgtattactgtgcaaagggggctggaagtggtagttactacccctgggatgacgtctggggccaggggacccaggtcaccgtctcctca

SEQ ID NO: 5008 - DNA, 366 bp, synthetic construct
  source 1..366: mol_type = other DNA
gaggtgcagctggtggagtctgggggaggcttggcgcagcctggggggtctctgagactctcctgtgcagcctctggattcaccttcagtaactatgccatgagctgggcccgccaggctccaggaaaggggctcgagtgggtgtccggtatttatagtgatggtagcggcacatactatgcagactccgtgaagggccgattcaccatctccagagacaacgccaagaacacggtgtatctgcaaatgagcagcctgaaacctgaggacacggcactgtattactgtgcaaagggggctagaagtggtagttacgacccctgggatgacgtctggggccaggggacccaggtcaccgtctcctca

SEQ ID NO: 5009 - DNA, 366 bp, synthetic construct
  source 1..366: mol_type = other DNA
gaggtgcagctggtggagtctgggggaggcttggcgcagcctggggggtctctgagactctcctgtgcagcctctggattcaccttcagtaactatgccatgagctgggcccgccaggctccaggaaaggggctcgagtgggtgtccggtatttatagtgatggtagcggcacatactatgcagactccgtgaagggccgattcaccatctccagagacaacgccaagaacacggtgtatctgcaaatgagcagcctgaaacctgaggacacggcactgtattactgttcaaagggggctagaagtggtagttactacccctgggatgacgtctggggccaggggacccaggtcaccgtctcctca

SEQ ID NO: 5010 - DNA, 366 bp, synthetic construct
  source 1..366: mol_type = other DNA
gaggtgcagctggtggagtctgggggaggcttggcgcagcctggggggtctctgagactctcctgtgcagcctctggattcaccttcagtaactatgccatgagctgggcccgccaggctccaggaaaggggctcgagtgggtgtccggtatttatagtgatggtagcggcacatactatgcagactccgtgaagggccgattcaccatctccagagacaacgccaagaacacggtgtatctgcaaatgagcagcctgaaacctgaggacacggcactgtattactgtgcaaagggggctagtagtggtagttactacccctgggacgacgtctggggccaggggacccaggtcaccgtctcctca

SEQ ID NO: 5011 - DNA, 366 bp, synthetic construct
  source 1..366: mol_type = other DNA
gaggtgcagctggtggagtctgggggaggcttggcgcagcctgggggatctctgagactctcctgtgcagcctctggattcaccttcagtaactatgccatgagctgggcccgccaggctccaggaaaggggctcgagtgggtgtccggtatttatagtgatggtagcggcacatactatgcagactccgtgaagggccgattcaccatctccagagacaacgccaagaacacggtgtatctgcaaatgagcagcctgaaacctgaggacacggcactgtattactgtgcaaagggggctagaagtggtagttactacccctgggatggcgtctggggccaggggacccaggtcaccgtctcctca

SEQ ID NO: 5012 - DNA, 366 bp, synthetic construct
  source 1..366: mol_type = other DNA
gaggtgcagctggtggagtctgggggaggcttggcgcagcctggggggtctctgagactctcctgtgcagcctctggattcaccttcagtaactatgccatgagctgggcccgccaggctccaggaaaggggctcgagtgggtgtccggtatttatagtgatggtagcggcacatactatgcagactccgtgaagggccgattcaccatctccagagacaacgccaagaacacggtgtatctgcaaatgagcagcctgaaacctgaggacacggcactgtattactgtgcacagggggctagaagtggtagttactacccctgggatgacgtctggggccaggggacccaggtcaccgtctcctca

SEQ ID NO: 5013 - DNA, 366 bp, synthetic construct
  source 1..366: mol_type = other DNA
gaggtgcagctggtggagtctgggggaggcttggcgcagcctggggggtctctgagactctcctgtgcagcctctggattcaccttcagtaactatgccatgagctgggcccgccaggctccaggaaaggggctcgagtgggtgtccggtatttatagtgatggtagcggcacatactatgcagactccgtgaagggccgattcaccatctccagagacaacgccaagaacacggtgtatctgcaaatgagcagcctgaaacctgaggacacggcactgtattactgtgcaacgggggctagaagtggtagttactacccctgggatgacgtctggggccaggggacccaggtcaccgtctcctca

SEQ ID NO: 5014 - DNA, 366 bp, synthetic construct
  source 1..366: mol_type = other DNA
gaggtgcagctggtggagtctgggggaggcttggcgcagcctggggggtctctgagactctcctgtgcagcctctggattcaccttcagtaactatgccatgagctgggcccgccaggctccaggaaaggggctcgagtgggtgtccggtatttatagtgatggtagcggcacatactatgcagactccgtgaagggccgattcaccatctccagagacaacgccaagaacacggtgtatctgcaaatgagcagcctgaaacctgaggacacggcactgtattactgtgcaaagggggatagaagtggtagttactacccctgggatgacgtctggggccaggggacccaggtcaccgtctcctca

SEQ ID NO: 5015 - DNA, 366 bp, synthetic construct
  source 1..366: mol_type = other DNA
gaggtgcagctggtggagtctgggggaggcttggcgcagcctggggggtctctgagactctcctgtgcagcctctggattcaccttcagtaactatgccatgagctgggcccgccaggcaccaggaaaggggctcgagtgggtgtccggtatttatagtgatggtagcggcacatactatgcagactccgtgaagggccgattcaccatctccagagacaacgccaagaacacggtgtatctgcaaatgagcagcctgaaacctgaggacacggcactgtattactgtgcaaaggggtctagaagtggtagttactacccctgggatgacgtctggggccaggggacccaggtcaccgtctcctca

SEQ ID NO: 5016 - DNA, 366 bp, synthetic construct
  source 1..366: mol_type = other DNA
gaggtgcagctggtggagtctgggggaggcttggcgcagcctggggggtctctgagactctcctgtgcagcctctggattcaccttcagtaactatgccatgagctgggcccgccaggctccaggaaaggggctcgagtgggtgtccggtatttatagtgatggtagcggcacatactatgcagactccgtgaagggccgattcaccatctccagagacaacgccaagaacacggtgtatctgcaaatgagcagcctgaaacctgaggacacggcactgtattactgtgcaaagggggctagaagtggtagttactacccctgggataacgtctggggccaggggacccaggtcaccgtctcctca

SEQ ID NO: 5017 - DNA, 366 bp, synthetic construct
  source 1..366: mol_type = other DNA
gaggtgcagctggtggagtctgggggaggcttggcgcagcctggggggtctctgagactctcctgtgcagcctctggattcaccttcagtaactatgccatgagctgggcccgccaggctccaggaaaggggctcgagtgggtgtccggtatttatagtgatggtagcggcacatactatgcagactccgtgaagggccgattcaccatctccagagacaacgccaagaacacggtgtatctgcaaatgagcagcctgaaacctgaggacacggcactgtattactgtgcaaagggggctagacgtggtagttactacccctgggatgacgtctggggccaggggacccaggtcaccgtctcctca

SEQ ID NO: 5018 - DNA, 366 bp, synthetic construct
  source 1..366: mol_type = other DNA
gaggtgcagctggtggagtctgggggaggcttggcgcagcctggggggtctctgagactctcctgtgcagcctctggattcaccttcagtaactatgccatgagctgggcccgccaggctccaggaaaggggctcgagtgggtgtccggtatttatagtgatggtagcggcacatactatgcagactccgtgaagggccgattcaccatctccagagacaacgccaagaacacggtgtatctgcaaatgagcagcctgaaacctgaggacacggcactgtattactgtgtaaagggggctagaagtggtagttactacccctgggatgacgtctggggccaggggacccaggtcaccgtctcctca

SEQ ID NO: 5019 - DNA, 366 bp, synthetic construct
  source 1..366: mol_type = other DNA
gaggtgcagctggtggagtctgggggaggcttggcgcagcctggggggtctctgagactctcctgtgcagcctctggattcaccttcagtaactatgccatgagctgggcccgccaggctccaggaaaggggctcgagtgggtgtccggtatttatagtgatggtagcggcacatactatgcagactccgtgaagggccgattcaccatctccagagacaacgccaagaacactgtgtatctgcaaatgagcagcctgaaacctgaggacacggcactgtattactgtgcaaagggggctagaagtggtagttactacccctggtatgacgtctggggccaggggacccaggtcaccgtctcctca

SEQ ID NO: 5020 - DNA, 366 bp, synthetic construct
  source 1..366: mol_type = other DNA
gaggtgcagctggtggagtctgggggaggcttggcgcagcctggggggtctctgagactctcctgtgcagcctctggattcaccttcagtaactatgccatgagctgggcccgccaggctccaggaaaggggctcgagtgggtgtccggtatttatagtgatggtagcggcacatactatgcagactccgtgaagggccgattcaccatctccagagacaacgccaagaacacggtgtatctgcaaatgagcagcctgaaacctgaggacacggcactgtattactgtacaaagggggctagaagtggtagttactacccctgggatgacgtctggggccaggggacccaggtcaccgtctcctca

SEQ ID NO: 5021 - DNA, 366 bp, synthetic construct
  source 1..366: mol_type = other DNA
gaggtgcagctggtggagtctgggggaggcttggcgcagcctggggggtctctgagactctcctgtgcagcctctggattcaccttcagtaactatgccatgagctgggcccgccaggctccaggaaaggggctcgagtgggtgtccggtatttatagtgatggtagcggcacatactatgcagactccgtgaagggccgattcaccatctccagagacaacgccaagaacacggtgtatctgcaaatgagcagcctgaaacctgaggacacggcactgtattactgtgcaaagggggctagaagtggtatttactacccctgggatgacgtctggggccaggggacccaggtcaccgtctcctca

SEQ ID NO: 5022 - DNA, 366 bp, synthetic construct
  source 1..366: mol_type = other DNA
gaggtgcagctggtggagtctgggggaggcttggcgcagcctggggggtctctgagactctcctgtgcagcctctggattcaccttcagtaactatgccatgagctgggcccgccaggctccaggaaaggggctcgagtgggtgtccggtatttatagtgatggtagcggcacatactatgcagactccgtgaagggccgattcaccatctccagagacaacgccaagaacacggtgtatctgcaaatgagcagcctgaaacctgaggacacggcactgtattactgtgcaaagggggctagaagtggtagtgactacccctgggatgacgtctggggccaggggacccaggtcaccgtctcctca

SEQ ID NO: 5023 - DNA, 366 bp, synthetic construct
  source 1..366: mol_type = other DNA
gaggtgcagctggtggagtctgggggaggcttggcgcagcctggggggtctctgagactctcctgtgcagcctctggattcaccttcagtaactatgccatgagctgggcccgccaggctccaggaaaggggctcgagtgggtgtccggtatttatagtgatggtagcggcacatactatgcagactccgtgaagggccgattcaccatctccagagacaacgccaagaacacggtgtatctgcaaatgagcagcctgaaacctgaggacacggcactgtattactgtgcaaagggggctagaagtggtagttactacccctgggatgtcgtctggggccaggggacccaggtcaccgtctcctca

SEQ ID NO: 5024 - DNA, 366 bp, synthetic construct
  source 1..366: mol_type = other DNA
gaggtgcagctggtggagtctgggggaggcttggcgcagcctggggggtctctgagactctcctgtgcagcctctggattcaccttcagtaactatgccatgagctgggcccgccaggctccaggaaaggggctcgagtgggtgtccggtatttatagtgatggtagcggcacatactatgcagactccgtgaagggccgattcaccatctccagagacaacgccaagaacacggtgtatctgcaaatgagcagcctgaaacctgaggacacggcactgtattactgtgcaaagggggctagaggtggtagttactacccctgggatgacgtctggggccaggggacccaggtcaccgtctcctca

SEQ ID NO: 5025 - DNA, 366 bp, synthetic construct
  source 1..366: mol_type = other DNA
gaggtgcagctggtggagtctgggggaggcttggcgcagcctggggggtctctgagactctcctgtgcagcctctggattcaccttcagtaactatgccatgagctgggcccgccaggctccaggaaaggggctcgagtgggtgtccggtatttatagtgatggtagcggcacatactatgcagactccgtgaagggccgattcaccatctccagagacaacgccaagaccacggtgtatctgcaaatgagcagcctgaaacctgaggacacggcactgtattactgtgcaaagggggctagaagtggtagttacgacccctgggatgacgtctggggccaggggacccaggtcaccgtctcctca

SEQ ID NO: 5026 - DNA, 366 bp, synthetic construct
  source 1..366: mol_type = other DNA
gaggtgcagctggtggagtctgggggaggcttggcgcagcctggggggtctctgagactctcctgtgcagcctctggattcaccttcagtaactatgccatgagctgggcccgccaggctccaggaaaggggctcgagtgggtgtccggtatttatagtgatggtagtggcacatactatgcagactccgtgaagggccgattcaccatctccagagacaacgccaagaacacggtgtatctgcaaatgagcagcctgaaacctgaggacacggcactgtattactgtgcaaagggggctagaagtggtaggtactacccctgggatgacgtctggggccaggggacccaggtcaccgtctcctca

SEQ ID NO: 5027 - DNA, 366 bp, synthetic construct
  source 1..366: mol_type = other DNA
gaggtgcagctggtggagtctgggggaggcttggcgcagcctggggggtctctgagactctcctgtgcagcctctggattcaccttcagtaactatgccatgagctgggcccgccaggctccaggaaaggggctcgagtgggtgtccggtatttatagtgatggtagcggcacatactatgcagactccgtgaagggccgattcaccatctccagagacaacgccaagaacacggtgtatctgcaaatgagcagcctgaaacctgaggacacggcactgtattactgtgaaaagggggctagaagtggtagttactacccctgggatgacgtctggggccaggggacccaggtcaccgtctcctca

SEQ ID NO: 5028 - DNA, 366 bp, synthetic construct
  source 1..366: mol_type = other DNA
gaggtgcagctggtggagtctgggggaggcttggcgcagcctggggggtctctgagactctcctgtgcagcctctggattcaccttcagtaactatgccatgagctgggcccgccaggctccaggaaaggggctcgagtgggtgtccggtatttatagtgatggtagcggcacatactatgcagactccgtgaagggccgattcaccatctccagagacaccgccaagaacacggtgtatctgcaaatgagcagcctgaaacctgaggacacggcactgtattactgtgcaaagggggctagaagtggtagttacgacccctgggatgacgtctggggccaggggacccaggtcaccgtctcctca

SEQ ID NO: 5029 - DNA, 366 bp, synthetic construct
  source 1..366: mol_type = other DNA
gaggtgcagctggtggagtctgggggaggcttggcgcagcctggggggtctctgagactctcctgtgcagcctctggattcaccttcagtaactatgccatgagctgggcccgccaggctccaggaaaggggctcgagtgggtgtccggtatttatagtgatggtagcggcacatactatgcagactccgtgaagggccgattcaccatctccagagacaacgccaagaacacggtgtatctgcaaatgagcagcctgaaacctgaggacacggcactgtattactgtgcaatgggggctagaagtggtagttactacccctgggatgacgtctggggccaggggacccaggtcaccgtctcctca

SEQ ID NO: 5030 - DNA, 366 bp, synthetic construct
  source 1..366: mol_type = other DNA
gaggtgcagctggtggagtctgggggaggcttggcgcagcctggggggtctctgagactctcctgtgcagcctctggattcaccttcagtgactatgccatgagctgggcccgccaggctccaggaaaggggctcgagtgggtgtccggtatttatagtgatggtagcggcacatactatgcagactccgtgaagggccgattcaccatctccagagacaacgccaagaacacggtgtatctgcaaatgagcagcctgaaacctgaggacacggcactgtattactgtgcaaagggggttagaagtggtagttactacccctgggatgacgtctggggccaggggacccaggtcaccgtctcctca

SEQ ID NO: 5031 - DNA, 366 bp, synthetic construct
  source 1..366: mol_type = other DNA
gaggtgcagctggtggagtctgggggaggcttggcgcagcctggggggtctctgagactctcctgtgcagcctctggattcaccttcagtaactatgccatgagctgggcccgccaggctccaggaaaggggctcgagtgggtgtccggtatttatagtgatggtagcggcacatactatgcagactccgtgaagggccgattcaccatctccagagacaacgccaagaacacggtgtatctgcaaatgagcagcctgaaacctgaggacacggcactgtattactgtgcaaagggggctagaagtggtagttactaccccttggatgacgtctggggccaggggacccaggtcaccgtctcctca

SEQ ID NO: 5032 - DNA, 366 bp, synthetic construct
  source 1..366: mol_type = other DNA
gaggtgcagctggtggagtctgggggaggcttggcgcagcctggggggtctctgagactctcctgtgcagcctctggattcaccttcagtaactatgccatgagctgggcccgccaggctccaggaaaggggctcgagtgggtgtccggtatttatagtgatggtagcggcacatactatgcagactccgtgaagggccgattcaccatctccagagacaacgccaagaacacggtgtatctgcaaatgagcagcctgaaacctgaggacacggcactgtattactgtgcaaagggggctagaagtggtagttcctacccctgggatgacgtctggggccaggggacccaggtcaccgtctcctca

SEQ ID NO: 5033 - DNA, 366 bp, synthetic construct
  source 1..366: mol_type = other DNA
gaggtgcagctggtggagtctgggggaggcttggcgcagcctggggggtctctgagactctcctgtgcagcctctggattcaccttcagtaactatgccatgagctgggcccgccaggctccaggaaaggggctcgagtgggtgtccggtatttatagtgatggtagcggcacatactatgcagactccgtgaagggccgattcaccatctccagagacaacgccaagaacacggtgtatctgcaaatgagcagcctgaaacctgaggacacggcactgtattactgtgcaaaggtggctagaagtggtagttactacccctgggatgacgtctggggccaggggacccaggtcaccgtctcctca

SEQ ID NO: 5034 - DNA, 366 bp, synthetic construct
  source 1..366: mol_type = other DNA
gaggtgcagctggtggagtctgggggaggcttggcgcagcctggggggtctctgagactctcctgtgcagcctctggattcaccttcagtaactatgccatgagctgggcccgccaggctccaggaaaggggctcgagtgggtgtccggtatttatagtgatggtagcggcacatactatgcagactccgtgaagggccgattcaccatctccagagacaacgccaagaacacggtgtatctgcaaatgagcagcctgaaacctgaggacacggcactgtattactgtgcaaagggggctagaagtggtagttactaccactgggatgacgtctggggccaggggacccaggtcaccgtctcctca

SEQ ID NO: 5035 - DNA, 366 bp, synthetic construct
  source 1..366: mol_type = other DNA
gaggtgcagctggtggagtctgggggaggcttggcgcagcctggggggtctctgagactctcctgtgcagcctctggattcaccttcagtaactatgccatgagctgggcccgccaggctccaggaaaggggctcgagtgggtgtccggtatttatagtgatggtagcggcacatactatgcagactccgtggagggccgattcaccatctccagagacaacgccaagaacacggtgtatctgcaaatgagcagcctgaaacctgaggacacggcactgtattactgtgcaaagggggctagaagtggtggttactacccctgggatgacgtctggggccaggggacccaggtcaccgtctcctca

SEQ ID NO: 5036 - DNA, 366 bp, synthetic construct
  source 1..366: mol_type = other DNA
gaggtgcagctggtggagtctgggggaggcttggcgcagcctggggggtctctgagactctcctgtgcagcctctggattcaccttcagtaactatgccatgagctgggcccgccaggctccaggaaaggggctcgagtgggtgtccggtatttatagtgatggtagcggcacatactatgcagactccgtgaagggccgattcaccatctccagagacaacgccaagaacacggtgtatctgcaaatgagcagcctgaaacctgaggacacggcactgtatttctgtgcaaagggggctagaagtggtagttactacccctgggatggcgtctggggccaggggacccaggtcaccgtctcctca

SEQ ID NO: 5037 - DNA, 366 bp, synthetic construct
  source 1..366: mol_type = other DNA
gaggtgcagctggtggagtctgggggaggcttggcgcagcctggggggtctctgagactctcctgtgcagcctctggattcaccttcagtaactatgccatgagctgggcccgccaggctccaggaaaggggctcgagtgggtgtccggtatttatagtgatggtagtggcacatactatgcagactccgtgaagggccgattcaccatctccagagacaacgccaagaatgtggtatatctgcaaatgaacagcctgaaagctgaggacacggcactgtattactgtgcaaagggccttaatagtggtagttactacccttgggatgacaactggggccaggggacccaggtcaccgtctcctca

SEQ ID NO: 5038 - DNA, 366 bp, synthetic construct
  source 1..366: mol_type = other DNA
gaggtgcagctggtggagtctgggggaggcttggcgcagcctggggggtctctgagactctcctgtgcagcctctggattcactttcagtaactatgccatgagctgggcccgccaggctccaggaaaggggctcgagtgggtgtccggtatttatagtgatagtagtgccacatactatgcagactccgtgaagggccgcttcaccatctccagagacaacgccaagaacacggtgtatctgcaaatgaacagcctgaaacctgaggacacggcactgtattactgtgcaaagggccttaatagtggtagttactacccttgggatgactactggggccaggggacccaggtcaccgtctcctca

SEQ ID NO: 5039 - DNA, 366 bp, synthetic construct
  source 1..366: mol_type = other DNA
gaggtgcagctggtggagtctgggggaggcttggcgcagcctggggggtctctgagactctcctgtgcagcctctggattcaccttcagtaactatgccatgagctgggcccgccaggctccaggaaaggggctcgagtgggtgtccggtatttatagtgatggtagtggcacatactatgcagactccgtgaagggccgattcaccatctccagagacaacgccaagaacacggtatatctgcaaatgaacagcctgaaagctgaggacacggcactgtattactgtgcaaagggcctcaatagtggtagttactacccttgggatgactactggggccaggggacccaggtcaccgtctcctca

SEQ ID NO: 5040 - DNA, 366 bp, synthetic construct
  source 1..366: mol_type = other DNA
gaggtgcagctggtggagtctgggggaggcttggcgcagcctggggggtctctgagactctcctgtgcagcctcgggattcaccttcagtaactatgccatgagctgggcccgccaggctccaggaaaggggctcgagtgggtgtccggtatttatagtgatggtagtggcacatactatgcagactccgtgaagggccgattcaccatctccagagacaacgccaagaatacggtgtatctgcaaatgaacagcctgaaacctgaggacacggcactgtattactgtgcaaaagggaggaatagtggtagttactatccctgggatgaccactggggccaggggacccaggtcaccgtctcctca

SEQ ID NO: 5041 - DNA, 366 bp, synthetic construct
  source 1..366: mol_type = other DNA
gaggtgcagctggtggagtctgggggaggcttggcgcagcctggggggtctctgagactctcctgtgcagcctctggattcaccttcagtaactatgccatgagctgggcccgccaggctccaggcaaggggctcgagtgggtgtccggtatttatagtgatggtagtgacacatactctgcagactccgtgaagggccgattcaccatctccagagacaacgccaagaacacggtgtatctgcaaatgaacagcctgaaacctgaggacacggcactgtattactgtctaaaagggaagaatagtggtagttactacccctgggatgactactggggccaggggacccaggtcaccgtctcctca

SEQ ID NO: 5042 - DNA, 366 bp, synthetic construct
  source 1..366: mol_type = other DNA
gaggtgcagctggtggagtctgggggaggcttggcgcagcctggggggtctctgagactctcctgtgcagcctctggattcaccttcagtagctatgccatgagttgggtccgccaggctccaggaaaggggctcgagtgggtgtccgggatttatagtgatggtagtgacacatactctgcagactccgtgaagggccgattcaccatctccagagacaacgccaagaacacggtgtatctgcaaatgaacagcctgaaacctgaggacacggcactgtattactgtgtaaaagggaagaatagtggtagttactacccctgggatgactactggggccaggggacccaggtcaccgtctcctca

SEQ ID NO: 5043 - DNA, 366 bp, synthetic construct
  source 1..366: mol_type = other DNA
gaggtgcagctggtggagtctgggggaggcttggcgcagcctggggggtctctgagactctcctgtgcagcctctggattcaccttcagtaactatgccatgagctgggcccgccaggctccaggaaaggggctcgagtgggtgtccggtatttatagtgatggtagtggcacctactatgcagactccgtgaagggccgattcaccatctccagagacaacgccaagaatacggtgtatctgcaaatgaacagcctgaaacctgaggacacggcactgtattactgtgcaaatgggaggaatagtggtagttactatccctgggatgactattggggccaggggacccaggtcaccgtctcctca

SEQ ID NO: 5044 - DNA, 366 bp, synthetic construct
  source 1..366: mol_type = other DNA
gaggtgcagctggtggagtctgggggaggcttggcgcagcctggggggtctctgagactctcctgtgcagcctctggattcaccttcagtaactatgccatgagctgggcccgccaggctccaggaaaggggctcgagtgggtgtccggtatttatagtgatggtagtggcacatactatgcagactccgtgaagggccgattcaccatctccagagacaacgccaagaatgtggtatatctgcaaatgaacagcctgaaagctgaggacacggcactgtattactgtgcaaagggccttaatagtggtggttactacccttgggatgacaactggggccaggggacccaggtcaccgtctcctca

SEQ ID NO: 5045 - DNA, 366 bp, synthetic construct
  source 1..366: mol_type = other DNA
gaggtgcagctggtggagtctgggggaggcttggcgcagcctggggggtctctgagactctcctgtgcagcctctggattcaccttcagtaactatgccatgagctgggcccgccaggctccaggaaaggggctcgagtgggtgtccggtatttatagtgatggtagtggcacatactatgcagactccgtgaagggccgattcaccatctccagagacaacgccaagaatgtggtatatctgcaaatgaacagcctgaaagctgaggacacggcactgtattactgtgcaaagggccttaatagaggtagttactacccttgggatgacaactggggccaggggacccaggtcaccgtctcctca

SEQ ID NO: 5046 - DNA, 366 bp, synthetic construct
  source 1..366: mol_type = other DNA
gaggtgcagctggtggagtctgggggaggcttggcgcagcctggggggtctctgagactctcctgtgcagcctctggattcaccttcagtaactatgccatgagctgggcccgccaggctccaggaaaggggctcgagtgggtgtccggtatttatagtgatggtagtggcacatactatgcagactccgtgaagggccgattcaccatctccagagacaacgccaagaatgtggtatatctgcaaatgaacagcctgaaagctgaggacacggcactgtattactgtgcaaagggccttagtagtggtagttactacccttgggatgacaactggggccaggggacccaggtcaccgtctcctca

SEQ ID NO: 5047 - DNA, 366 bp, synthetic construct
  source 1..366: mol_type = other DNA
gaggtgcagctggtggagtctgggggaggcttggcgcagcctggggggtctctgagactctcctgtgcagcctctggattcaccttcagtaactatgccatgagctgggcccgccaggctccaggaaaggggctcgagtgggtgtccggtatttatagtgatggtagtggcacatactatgcagactccgtgaagggccgattcaccatctccagagacaacgccaagaatgtggtatatctgcaaatgaacagcctgaaagctgaggacacggcactgtattactgtgcaaagggccttaatagtggtagttacgacccttgggatgacaactggggccaggggacccaggtcaccgtctcctca

SEQ ID NO: 5048 - DNA, 366 bp, synthetic construct
  source 1..366: mol_type = other DNA
gaggtgcagctggtggagtctgggggaggcttggcgcagcctggggggtctctgagactctcctgtgcagcctttggattcaccttcagtaactatgccatgagctgggcccgccaggctccaggaaaggggctcgagtgggtgtccggtatttatagtgatggtagtggcacatactatgcagactccgtgaagggccgattcaccatctccagagacaacgccaagaatacggtgtatctgcaaatgaacagcctgaaacctgaggacacggcactgtattactgtgcaaaagggaggaatagtggtagttactatccctgggatgacttttggggccaggggacccaggtcaccgtctcctca

SEQ ID NO: 5049 - DNA, 366 bp, synthetic construct
  source 1..366: mol_type = other DNA
gaggtgcagctggtggagtctgggggaggcttggcgcagcctggggggtctctgagactctcctgtgcagcctctggattcaccttcagtaactatgccatgagctgggcccgccaggctccaggaaaggggctcgagtgggtgtccggtatttatagtgatggtagtggcacatactatgcagactccgtgaagggccgattcaccatctccagagacaacgccaagaatgtggtatatctgcaaatgaacagcctgaaagctgaggacacggcactgtattactgtgcaaagggccttaagagtggtagttactacccttgggatgacaactggggccaggggacccaggtcaccgtctcctca

SEQ ID NO: 5050 - DNA, 366 bp, synthetic construct
  source 1..366: mol_type = other DNA
gaggtgcagctggtggagtctgggggaggcttggcgcagcctggggggtctctgagactctcctgtgcagcctctggattcaccttcagtaactatgccatgagctgggcccgccaggctccaggaaaggggctcgagtgggtgtccggtatttatagtgatggtagtggcacatactatgcagactccgtgaagggccgattcaccatctccagagacaacgccaagaatgtggtatatctgcaaatgaacagcctgaaagctgaggacacggctctgtattactgtgcaacgggccttaatagtggtagttactacccttgggatgacaactggggccaggggacccaggtcaccgtctcctca

SEQ ID NO: 5051 - DNA, 366 bp, synthetic construct
  source 1..366: mol_type = other DNA
gaggtgcagctggtggagtctgggggaggcttggcgcagcctggggggtctctgagactctcctgtgcagcctctggattcaccttcagtaactatgccatgagctgggcccgccaggctccaggaaaggggctcgagtgggtgtccggtatttatagtgatggtagtggcacatactatgcagactccgtgaagggccgattcaccatctccagagacaacgccaagaatgtggtatatctgcaaatgaacggcctgaaagctgaggacacggcgctgtattactgtgcaaagggccttaatagtggtagttactacccttgggatgacaactggggccaggggacccaggtcaccgtctcctca

SEQ ID NO: 5052 - DNA, 366 bp, synthetic construct
  source 1..366: mol_type = other DNA
gaggtgcagctggtggagtctgggggaggcttggtgcagcctggggggtctctgagactctcctgtgcagcctctggattcaccttcagtaactatgccatgagctgggcccgccaggctccaggaaaggggctcgagtgggtgtccggtatttatagtgatggtagtggcacatactatgcagactccgtgaagggccgattcaccatctccagagacaacgccaagaatgtggtatatctgcaaatgaacagcctgaaagctgaggacacggcactgtattactgtgcaaagggccttaatagtggtagttactacccttgggatgacaactggggccaggggacccaggtcaccgtctcctca

SEQ ID NO: 5053 - DNA, 366 bp, synthetic construct
  source 1..366: mol_type = other DNA
gaggtgcagctggtggagtctgggggaggcttggcgcagcctggggggtctctgagactctcctgtgcagcctctggattcactttcagtaactatgccatgagctgggcccgccaggctccaggaaaggggctcgagtgggtgtccggtatttatagtgatagtagtgccacatactatgcagactccgtgaagggccgattcaccatctccagggacaacgccaagaacacggtgtatctgcaaatgaacagcctgaaacctgaggacacggcactgtattactgtgcaaagggccttaatagtggtagttactacccttgggatggctactggggccaggggacccaggtcaccgtctcctca

SEQ ID NO: 5054 - DNA, 366 bp, synthetic construct
  source 1..366: mol_type = other DNA
gaggtgcagctggtggagtctgggggaggcttggcgcagcctggggggtctctgagactctcctgtgcagcctctggattcaccttcagtaactatgccatgagctgggcccgccaggctccaggaaaggggctcgagtgggtgtccggtatttatagtgatggtagtggcacatactatgcagactccgtgaagggccgattcaccatctccagagacaacgccaagaacacggtgtatctgcaaatgaacagcctgaaacctgaggacacggcactgtattactgtgcaaagggccttaatagtggtagttactacccttgggatgtctactggggccaggggacccaggtcaccgtctcctca

SEQ ID NO: 5055 - DNA, 366 bp, synthetic construct
  source 1..366: mol_type = other DNA
gaggtgcagctggtggagtctgggggaggcttggcgcagcctggggggtctctgagactctcctgtgcagcctctggattcaccttcagtaactatgccatgagctgggcccgccaggctccaggaaaggggctcgagtgggtgtccggtatttatagtgatggtagtggcacatactatgcagactccgtgaagggccgattcaccatctccagagacaacgccaagaacacggtatatctgcaaatgaacagcctgaaagctgaggacacggcactgtattactgtgcaaagggccttaatagtggtagttactacccttggtatgactactggggccaggggacccaggtcaccgtctcctca

SEQ ID NO: 5056 - DNA, 366 bp, synthetic construct
  source 1..366: mol_type = other DNA
gaggtgcagctggtggagtctgggggaggcttggcgcagcctggggggtctctgagactctcctgtgcagcctctggattcactttcagtaactatgccatgagctgggcccgccaggctccaggaaaggggctcgagtgggtgtccggtatttatagtgatagtagtgccacatactatgcagactccgtgaagggccgattcaccatctccagagacaacgccaagaacacggtgtatctgcaaatgaacagcctgaaacctgaggacacggcactgtattactgtgcaaagggccttaatagtggtagttactacccttgggatgtctactggggccaggggacccaggtcaccgtctcctca

SEQ ID NO: 5057 - DNA, 366 bp, synthetic construct
  source 1..366: mol_type = other DNA
gaggtgcagctggtggagtctgggggaggcttagcgcagcctggggggtctctgagactctcctgtgcagcctctggattcaccttcagtaactatgccatgagctgggcccgccaggctccaggaaaggggctcgagtgggtgtccggtatttatagtgatggtagtggcacatactatgcagactccgtgaagggccgattcaccatctccagagacaacgccaagaatacggtgtatctgcaaatgaacagcctgaaacctgaggacacggcactgtattactgtgcaaaagggagtaatagtggtagttactatcccttggatgactattggggccaggggacccaggtcaccgtctcctca

SEQ ID NO: 5058 - DNA, 366 bp, synthetic construct
  source 1..366: mol_type = other DNA
gaggtgcagctggtggagtctgggggaggcttggcgcagcctggggggtctctgagactctcctgtgcagcctctggattcaccttcagtaactatgccatgagctgggcccgccaggctccaggaaaggggctcgagtgggtgtccggtatttatagtgatggtagtggcacatactatgcagactccgtgaagggccgattcaccatctccagagacaacgccaagaatgtggtatatctgcaaatgaacagcctgaaagctgaggacacggcactgtattactgtgcaaagggccttaatagtggtaggtactacccttgggatgacaactggggccaggggacccaggtcaccgtctcctca

SEQ ID NO: 5059 - DNA, 366 bp, synthetic construct
  source 1..366: mol_type = other DNA
gaggtgcagctggtggagtctgggggaggcttggcgcagcctggggggtctctgagactctcctgtgcagcctctggattcaccttcagtaactatgccatgagctgggtccgccaggctccaggaaaggggctcgagtgggtgtccggtatttatagtgatggtagtggcacatactatgcagactccgtgaagggccgattcaccatctccagagacaacgccaagaatacggtgtatctgcaaatgaacagcctgaaacctgaggacacggcactgtattactgtgcaaaggggaggaatagtggtagttactatccctgggatgaccactggggccaggggacccaggtcaccgtctcctca

SEQ ID NO: 5060 - DNA, 366 bp, synthetic construct
  source 1..366: mol_type = other DNA
gaggtgcagctggtggagtctgggggaggcttggtgcagcctggggggtctctgagactctcctgtgcagcctctggattcaccttcagtaactatgccatgagctgggcccgccaggctccaggaaaggggctcgagtgggtgtccggtatttatagtgatggtagtgacacatactctgcagactccgtgaagggccgattcaccatctccagagacaacgccaagaacacggtgtatctgcaaatgaacagcctgaaacctgaggacacggcactgtattactgtctaaaagggaagaatagtggtagttactacccctgggatgactactggggccaggggacccaggtcaccgtctcctca

SEQ ID NO: 5061 - DNA, 366 bp, synthetic construct
  source 1..366: mol_type = other DNA
gaggtgcagctggtggagtctgggggaggcttggcgcagcctggggggtctctgagactctcctgtgcagcctctggattcaccttcagtaactatgccatgagctgggtccgccaggctccaggaaaggggctcgagtgggtgtccggtatttatagtgatggtagtggcacatactatgcagactccgtgaagggccgattcaccatctccagagacaacgccaagaatacggtgtatctgcaaatgaacagcctgaaacctgaggacacggcactgtattactgtgcaaacgggaggaatagtggtagttactatccctgggatgactactggggccaggggacccaggtcaccgtctcctca

SEQ ID NO: 5062 - DNA, 366 bp, synthetic construct
  source 1..366: mol_type = other DNA
gaggtgcagctggtggagtctgggggaggcttggcgcagcctggggggtctctgagactctcctgtgcagcctctggattcaccttcagtaactatgccatgaactgggcccgccaggctccaggaaaggggctcgagtgggtgtccggtatttatagtgatggtagtggcacatactatgcagactccgtgaagggccgattcaccatctccagagacaacgccaagaacacggtgtatctgcaaatgaacagcctgaaacctgaggacacggcactgtattactgtggaaaagggctccatagtggtagttactacccatttgatgactactggggccaggggacccaggtcaccgtctcctca

SEQ ID NO: 5063 - DNA, 366 bp, synthetic construct
  source 1..366: mol_type = other DNA
gaggtgcagctggtggagtctgggggaggcttggtgcagcctggggggtctctgagactctcctgtgcagcctctggattcaccttcagtaactatgccatgaactgggcccgccaggctccaggaaaggggctcgagtgggtgtccggtatttatagtgatggtagtggcacatactatgcagactccgtgaagggccgattcaccatctccagagacaacgccaagaacacggtgtatctgcaaatgaacagcctgaaacctgaggacacggcactgtattactgtggaaaagggctccatagtggtagttactacccatttgatgactactggggccaggggacccaggtcaccgtctcctca

SEQ ID NO: 5064 - DNA, 366 bp, synthetic construct
  source 1..366: mol_type = other DNA
gaggtgcagctggtggagtctgggggaggcttggtgcagcctggggggtctctgagactctcctgtgcagcctctggattcaccttcagtatctatgccatgagctgggcccgccaggctccaggaaaggggctcgagtgggtgtccggtatttatagtgatggtagtaacacatactatgcagactccgtgaagggccgattcaccatctccagagacaacgccaagaacacggtgtatctgcaaatgaacagcctgaaacctgaggacacggcactgtattactgtttaaaagggaggcatagtggtagttactacccctgggatgactactggggccaggggacccaggtcaccgtctcctca

SEQ ID NO: 5065 - DNA, 366 bp, synthetic construct
  source 1..366: mol_type = other DNA
gaggtgcagctggtggagtctgggggaggcttggcgcagcctggggggtctctgagactctcctgtgcagcctctggattcaccttcagtatctatgccatgagctgggcccgccaggctccaggaaaggggctcgagtgggtgtccggtatttatagtgatggtagtaacacatactatgcagactccgtgaagggccgattcaccatctccagagacaacgccaagaacacggtgtatctgcaaatgaacagcctgaaacctgaggacacggcactgtattactgtttaaaagggaggcatagtggtagttactacccctgggatgactactggggccaggggacccaggtcaccgtctcctca

SEQ ID NO: 5066 - DNA, 366 bp, synthetic construct
  source 1..366: mol_type = other DNA
gaggtgcagctggtggagtctgggggaggcttggcgcagcctggggggtctctgagactctcctgtgcagcctctggattcaccttcagttactatgccatgagctgggtccgccaggctccaggaaaggggctcgagtgggtgtccggtatttatagtgatggcagtggcacatactatgcagactccgtgaagggccgattcaccatctccagagacaacgccaggaacacggtgtatctgcaaatgaacagcctgaaacctgaggacacggcactgtattactgtgtgaaagggaggcatagtggtagttactacccctgggatgactactggggccaggggacccaggtcaccgtctcctca

SEQ ID NO: 5067 - DNA, 366 bp, synthetic construct
  source 1..366: mol_type = other DNA
gaggtgcagctggtggagtctgggggaggcttggtgcaggctggggggtctctgagactctcctgtgcagcctctggattcaccttcagtaactatgccatgaactgggcccgccaggctccaggaaaggggctcgagtgggtgtccggtatttatagtgatggtagtggcacatactatacagactccgtgaagggccgattcaccatctccagagacgacgccaagaacacggtgtatctgcaaatgaacagcctgaaacctgaggacacggcactgtattactgtggaaaagggctccatagtggtagttactacccatttgatgactactggggccaggggacccaggtcaccgtctcctca

SEQ ID NO: 5068 - DNA, 366 bp, synthetic construct
  source 1..366: mol_type = other DNA
gaggtgcagctggtggagtctgggggaggcttggtgcaacctggggggtctctgagactctcctgtgcagcctctggattcaccttcagtaactatgccatgagctgggcccgccaggctccaggaaaggggctcgagtgggtgtccggtatttatagtgatggtagtggcacatactatgcagactccgtgaagggccgattcaccatctccagagacaacgccaagaacacggtgtatctgcaaatgaacagcctgaaacctgaggacacggcactgtattactgtataaaagctcgaaatagtggtagttactacccttgggatgactactggggccaggggacccaggtcaccgtctcctca

SEQ ID NO: 5069 - DNA, 366 bp, synthetic construct
  source 1..366: mol_type = other DNA
gaggtgcagctggtggagtctgggggaggcttggcgcagcctggggggtctctgagactctcctgtgcagcctctggattcaccttcagtaactatgccatgagctgggcccgccaggctccaggaaaggggctcgagtgggtgtccggtatttatagtgatggtagtggcacatactatgcagactccgtgaagggccgattcaccatctccagagacaacgccaagaacacggtgtatctgcaaatgaacagcctgaaacctgaggacacggcactgtattactgtataaaagctcgaaatagtggtagttactacccttgggatgactactggggccaggggacccaggtcaccgtctcctca

SEQ ID NO: 5070 - DNA, 366 bp, synthetic construct
  source 1..366: mol_type = other DNA
gaggtgcagctggtggagtctgggggaggcttggcgcagcctggggggtctctgagactctcctgtgcagcctctggattcaccttcagtaactatgccatgagctgggcccgccaggctccaggaaaggggctcgagtgggtgtccggtatttatagtgatggtagtggcacatactatgcagactccgtgaagggccgattcaccatctccagagacaacgccaagaatacggtgtatctgcaaatgaacagcctgaaacctgaggacacggcactgtattactgtgcaacagggaggaatagtggtagttactatccctgggatgactattggggccaggggacccaggtcaccgtctcctca

SEQ ID NO: 5071 - DNA, 366 bp, synthetic construct
  source 1..366: mol_type = other DNA
gaggtgcagctggtggagtctgggggaggcttggcgcagcctggggggtctctgagactctcctgtgcagcctctggattcaccttcagtaactatgccatgagctgggcccgccaggctccaggaaaggggctcgagtgggtgtccggtatttatagtgatggtagtggcacatactatgcagactccgtgaagggccgattcaccatctccagagacaacgccaagaatacggtgtatctgcaaatgaacagcctgaaacctgaggacacggcactgtattactgtacaaaagggaggaatagtggtagttactatccctgggatgactactggggccaggggacccaggtcaccgtctcctca

SEQ ID NO: 5072 - DNA, 366 bp, synthetic construct
  source 1..366: mol_type = other DNA
gaggtgcagctggtggagtctgggggaggcttggcgcagcctggggggtctctgagactctcctgtgcagcctctggattcaccttcagtaactatgccatgagctgggcccgccaggctccaggaaaggggctcgagtgggtgtccggtatttatagtgatggtagtggcacatactatgcagactccgtgaagggccgattcaccatctccagagacaacgccaagaatacggtgtatctgcaaatgaacagcctgaaacctgaggacacggcactgtattactgttcaaaagggaggaatagtggtagttactatccctgggatgactattggggccaggggacccaggtcaccgtctcctca

SEQ ID NO: 5073 - DNA, 366 bp, synthetic construct
  source 1..366: mol_type = other DNA
gaggtgcagctggtggagtctgggggaggcttggcgcagcctggggggtctctgagactctcctgtgcagcctctggattcaccttcagtaactatgccatgagctgggcccgccaggctccaggaaaggggctcgagtgggtgtccggtatctatagtgatggtagtggcacatactatgcagactccgtgaagggccgattcaccatctccagagacaacgccaagaatacggtgtatctgcaaatgaacagcctgaaacctgaggacacggcactgtattactgtgcaaaatggaggaatagtggtagttactatccctgggatgactactggggccaggggacccaggtcaccgtctcctca

SEQ ID NO: 5074 - DNA, 366 bp, synthetic construct
  source 1..366: mol_type = other DNA
gaggtgcagctggtggagtctgggggaggcttggcgcagcctggggggtctctgagactctcctgtgcagcctctggattcaccttcagtaactatgccatgagctgggcccgccaggctccaggaaaggggctcgagtgggtgtctggtatttatagtgatggtagaggcacatactatgcagactccgtgaagggccgattcaccatctccagagacaacgccaagaatacggtgtatctgcaaatggacagcctgaaacctgaggacacggcactgtattactgtttaaaagggaggaatagtggtagttactatccctgggatgactaccgggggcaggggacccaggtcaccgtctcctca

SEQ ID NO: 5075 - DNA, 366 bp, synthetic construct
  source 1..366: mol_type = other DNA
gaggtgcagctggtggagtcggggggaggcttggcgcagcctggggggtctctgagactctcctgtgcagcctctggattcaccttcagtaactatgccatgagctgggcccgccaggctccaggaaaggggctcgagtgggtgtccggtatttatagtgatggtagtggcacatactatgcagactccgtgaagggccgattcaccatctccagagacaacgccaagaacacggtgtatctgcaaatgaacagcctgaaacctgaggacacggcactgtattactgtataaaagctcgaaatagtggtagttacgacccttgggatgaccactggggccaggggacccaggtcaccgtctcctca

SEQ ID NO: 5076 - DNA, 366 bp, synthetic construct
  source 1..366: mol_type = other DNA
gaggtgcagctggtggagtctgggggaggcttggcgcagcctggggggtctctgagactctcctgtgcagcctctggattcaccttcagtaactatgccatgagctgggcccgccaggctccaggaaaggggctcgagtgggtgtccggtatttatagtgatggtagtggcacatactatgcagactccgtgaagggccgattcaccatctccagagacaacgccaagaacacggtgtatctgcaaatgaacagcctgaaacctgaggacacggcactgtattactgtaaaaaagctcgaaatagtggtagttactacccttgggatgacagctggggccaggggacccaggtcaccgtctcctca

SEQ ID NO: 5077 - DNA, 366 bp, synthetic construct
  source 1..366: mol_type = other DNA
gaggtgcagctggtggagtctgggggaggcttggcgcagcctggggggtctctgagactctcctgtgcagcctctggattcaccttcagtaactatgccatgagctgggcccgccaggctccaggaaaggggctcgagtgggtgtccggtatttatagtgatggtagtggcacatactatgcagactccgtgaagggccgattcaccatctccagagacaacgccaagaatacggtgtatctgcaaatgaacagcctgaaacctgaggacacggcactgtattactgtgcaatagggaggaatagtggtagttactatccctgggatgactattggggccaggggacccaggtcaccgtctcctca

SEQ ID NO: 5078 - DNA, 366 bp, synthetic construct
  source 1..366: mol_type = other DNA
gaggtgcagctggtggagtctgggggaggcttggcgcagcctggggggtctctgagactctcctgtgcagcctctggattcaccttcagtaactatgccatgagctgggcccgccaggctccaggaaaggggctcgagtgggtgtccggtatttatagtgatggtagtggcacatactatgcagactccgtgaagggccgattcaccatctccagagacaacgccaagaatacggtgtatctgcaaatgaacagcctgaaacctgaggacacggcactgtattactgtgaaaaagggaggaatagtggtagttactatccctgggatgactattggggccaggggacccaggtcaccgtctcctca

SEQ ID NO: 5079 - DNA, 366 bp, synthetic construct
  source 1..366: mol_type = other DNA
gaggtgcagctggtggagtctgggggaggcttggcgcagcctggggggtctctgagactctcctgtgcagcctctggattcaccttcagtaactatgccatgagctgggtccgccaggctccaggaaaggggctcgagtgggtgtccggtatttatagtgatggtagtggcacatactctgcagactccgtgaagggccgattcaccatctccagagacaacgccaagaacacggtgtatctgcaaatgaacagcctgaaacctgacgacacggcactgtattactgtgcaaaagcgaaacatagtggtagttactacccctgggatgactactggggccaggggacccaggtcaccgtctcctca

SEQ ID NO: 5080 - DNA, 366 bp, synthetic construct
  source 1..366: mol_type = other DNA
gaggtgcagctggtggagtcggggggaggcttggcgcagcctggggggtctctgagactctcctgtgcagcctctggattcaccttcagtaactatgccatgagctgggcccgccaggctccaggaaaggggctcgagtgggtgtccggtatttatagtgatggtagtggcacatactatgcagactccgtgaagggccgattcaccatctccagagacaacgccaagaacacggtgtatctgcaaatgaacagcctgaaacctgaggacacggcactgtattactgtataacagctcgaaatagtggtagttactacccttgggatgaccactggggccaggggacccaggtcaccgtctcctca

SEQ ID NO: 5081 - DNA, 366 bp, synthetic construct
  source 1..366: mol_type = other DNA
gaggtgcagctggtggagtctgggggaggcttggcgcagcctggggggtctctgagactctcctgtgcagcctctggattcaccttcagtaactatgccatgagctgggtccgccaggctccaggaaaggggctcgagtgggtgtccggtatttatagtgatggtagtggcacatactctgcagactccgtgaagggccgattcaccatctccagagacaacgccaagaacacggtgtatctgcaaatgaacagcctgaaacctgacgacactgcactgtattactgtgcaaaagggaaacagagtggtagttactacccctgggatgactactggggccaggggacccaggtcaccgtctcctca

SEQ ID NO: 5082 - DNA, 366 bp, synthetic construct
  source 1..366: mol_type = other DNA
gaggtgcagctggtggagtctgggggaggcttggcgcagcctggggggtctctgagactctcctgtgcagcctctggattcaccttcagtaactatgccatgagctgggcccgccaggctccaggaaaggggctcgagtgggtgtccggtatttatagtgatggtagtggcacatactatgcagactccgtgaagggccgattcaccatctccagagacaacgccaagaatacggtgtatctgcaaatgaacagcctgaaacctgaggacacggcactgtattactgtgcaaaagggaggaatggtggtagttactatccctgggatgactactggggccaggggacccaggtcaccgtctcctca

SEQ ID NO: 5083 - DNA, 366 bp, synthetic construct
  source 1..366: mol_type = other DNA
gaggtgcagctggtggagtctgggggaggcttggcgcagcctggggggtctctgagactctcctgtgcagcctctggattcaccttcagtaactatgccatgagctgggtccgccaggctccaggaaaggggctcgagtgggtgtccggtatttatagtgatggtagtggcacatactctgcagactccgtgaagggccgattcaccatctccagagacaacgccaagaacacggtgtatctgcaaatgaacagcctgaaacctgacgacacggcactgtattactgtgcaaaagggaaacatggtggtagttactacccctgggatgactactggggccaggggacccaggtcaccgtctcctca

SEQ ID NO: 5084 - DNA, 366 bp, synthetic construct
  source 1..366: mol_type = other DNA
gaggtgcagctggtggagtctgggggaggcttggcgcagcctggggggtctctgagactctcctgtgcagcctctggattcaccttcagtaactatgccatgagctgggtccgccaggctccaggaaaggggctcgagtgggtgtccggtatttatagtgatggtagtggcacatactctgcagactccgtgaagggccgattcaccatctccagagacaacgccaagaacacggtgtatctgcaaatgaacagcctgaaacctgacgacacggcactgtattactgtgcaaaagggaaacatagtggtagttacgacccctgggatgactactggggccaggggacccaggtcaccgtctcctca

SEQ ID NO: 5085 - DNA, 366 bp, synthetic construct
  source 1..366: mol_type = other DNA
gaggtgcagctggtggagtctgggggaggcttggcgcagcctggggggtctctgagactctcctgtgcagcctctggattcaccttcagtaactatgccatgagctgggtccgccaggctccaggaaaggggctcgagtgggtgtccggtatttatagtgatggtagtggcacatactctgcagactccgtgaagggccgattcatcatctccagagacaacgccaagaacacggtgtatctgcaaatgaacagcctgaaacctgacgacacggcactgtattactgtgcaaaagggaaacatagtggtagttactacccctgggatggctactggggccaggggacccaggtcaccgtctcctca

SEQ ID NO: 5086 - DNA, 366 bp, synthetic construct
  source 1..366: mol_type = other DNA
gaggtgcagctggtggagtctgggggaggcttggcgcagcctggggggtctctgagactctcctgtgcagcctctggattcaccttcagtaactatgccatgagctgggtccgccaggctccaggaaaggggctcgagtgggtgtccggtatttatagtgatggtagtggcacatactctgcagactccgtgaagggccgattcaccatctccagagacaacgccaagaacacggtgtatctgcaaatgaacagcctgaaacctgacgacacggcactgtattactgtgcaaatgggaaacatagtggtagttactacccctgggatgactactggggccaggggacccaggtcaccgtctcctca

SEQ ID NO: 5087 - DNA, 366 bp, synthetic construct
  source 1..366: mol_type = other DNA
gaggtgcagctggtggagtctgggggaggcttggcgcagcctggggggtctctgagactctcctgtgcagcctctggattcaccttcagtaactatgccatgagctgggtccgccaggctccaggaaaggggctcgagtgggtgtccggtatttatagtgatggtagtggcacatactctgcagactccgtgaagggccgattcaccatctccagagacaacgccaagaacacggtgtatctgcaaatgaacagcctgaaacctgacgacacggcactgtattactgtgcaaaagggaaacatcgtggtagttactacccctgggatgactactggggccaggggacccaggtcaccgtctcctca

SEQ ID NO: 5088 - DNA, 366 bp, synthetic construct
  source 1..366: mol_type = other DNA
gaggtgcagctggtggagtctgggggaggcttggcgcagcctggggggtctctgagactctcctgtgcagcctctggattcaccttcagtaactatgccatgagctgggtccgccaggctccaggaaaggggctcgagtgggtgtccggtatttatagtgatggtagtggcacatactctgcagactccgtgaagggccgattcaccatctccagagacaacgccaagaacacggtgtatctgcaaatgaacagcctgaaacctgacgacacggcactgtattactgtgcaacagggaaacatagtggtagttactacccctgggatgactactggggccaggggacccaggtcaccgtctcctca

SEQ ID NO: 5089 - DNA, 366 bp, synthetic construct
  source 1..366: mol_type = other DNA
gaggtgcagctggtggagtctgggggaggcttggcgcagcctggggggtctctgagactctcctgtgcagcctctggattcaccttcagtaactatgccatgagctgggtccgccaggctccaggaaaggggctcgagtgggtgtccggtatttatagtgatggtagtggcacatactctgcagactccgtgaagggccgattcaccatctccagagacaacgccaagaacacggtgtatctgcaaatgaacagcctgaaacctgacgacacggcactgtattactgtgcaaaagggaaacatagtggtaggtactacccctgggatgactactggggccaggggacccaggtcaccgtctcctca

SEQ ID NO: 5090 - DNA, 366 bp, synthetic construct
  source 1..366: mol_type = other DNA
gaggtgcagctggtggagtctgggggaggcttggcgcagcctggggggtctctgagactctcctgtgcagcctctggattcaccttcagtaactatgccatgagctgggcccgccaggctccaggaaaggggctcgagtgggtgtccggtatttatggtgatggtagtggcacatactatgcggactccgtgaagggccgattcaccatctccagagacaacgccaagaacacggtgtatctgcaaatgaacagcctgaaacctgaggacacggcactgtattactgtgcaaaagggaggggtggtggtagttactacccctgggatgactactggggccaggggacccaggtcaccgtctcctca

SEQ ID NO: 5091 - DNA, 366 bp, synthetic construct
  source 1..366: mol_type = other DNA
gaggtgcagctggtggagtctgggggaggcttggcgcagcctggggggtctctgagactctcctgtgcagcctctggattcaccttcagtaactatgccatgagctgggtccgccaggctccaggaaaggggctcgagtgggtgtccggtatttatagtgatggtagtggcacatactctgcagactccgtgaagggccgattcaccatctccagagacaacgccaagaacacggtgtatctgcaaatgaacagcctgaaacctgacgacacggcactgtattactgtgcaaaagggaaacatagtggtagttactacccctgggatgcctactggggccaggggacccaggtcaccgtctcctca

SEQ ID NO: 5092 - DNA, 366 bp, synthetic construct
  source 1..366: mol_type = other DNA
gaggtgcagctggtggagtctgggggaggcttggcgcagcctggggggtctctgagactctcctgtgcagcctctggattcaccttcagtaactatgccatgagctgggtccgccaggctccaggaaaggggctcgagtgggtgtccggtatttatagtgatggtagtggcacatactctgcagactccgtgaagggccgattcaccatctccagagacaacgccaagaacacggtgtatctgcaaatgaacagcctgaaacctgacgacacggcactttattactgtgcaaaagtgaaacatagtggtagttactacccctgggatgactactggggccaggggacccaggtcaccgtctcctca

SEQ ID NO: 5093 - DNA, 366 bp, synthetic construct
  source 1..366: mol_type = other DNA
gaggtgcagctggtggagtctgggggaggcttggcgcagcctggggggtctctgagactctcctgtgcagcctctggattcaccttcagtaactatgccatgagctgggcccgccaggctccaggaaaggggctcgagtgggtgtccggtatttatagtgatagtagtggcacatactatgctgactccgtgaagggccgattcaccatctccagagacaacgccaagaacacggtgtatctgcaaatgaacagcctgaaacctgaggacacggcactgtattactgtgcaaagggtcgagggggtggtagttactacccctttgatgactactggggccaggggacccaggtcaccgtctcctca

SEQ ID NO: 5094 - DNA, 366 bp, synthetic construct
  source 1..366: mol_type = other DNA
gaggtgcagctggtggagtctgggggaggcttggcgcagcctggggggtctctgagactctcctgtgcagcctctggattcaccttcagttactatgccatgagctgggtccgccaggctccaggaaaggggctcgagtgggtgtccggtatttatagtgatggcagtggcacatactatgcagactccgtgaagggccgattcaccatctccagagacaacgccaagaacacggtgtatctgcaaatgaacagcctgaaacctgaggacacagcactgtattactgtgcaacagggaggcatagtggtagttactacccctgggatgactactggggccaggggacccaggtcaccgtctcctca

SEQ ID NO: 5095 - DNA, 366 bp, synthetic construct
  source 1..366: mol_type = other DNA
gaggtgcagctggtggagtctgggggaggcttggcgcagcctggggggtctctgagactctcctgtgcagcctctggattcaccttcagtaactatgccatgagctgggtccgccaggctccaggaaaggggctcgagtgggtgtccggtatttatagtgatggtagtggcacatactctgcagactccgtgaagggccgattcaccatctccagagacaacgccaagaacacggtgtatctgcaaatgaacagcctgaaacctgacgacacggcactgtattactgtgcaaaagggaaacatagtggtagttactacccctgggatgaccactggggccaggggacccaggtcaccgtctcctca

SEQ ID NO: 5096 - DNA, 366 bp, synthetic construct
  source 1..366: mol_type = other DNA
gaggtgcagctggtggagtctgggggaggcttggcgcagcctggggggtctctgagactctcctgtgcagcctctggattcaccttcagtaactatgccatgagctgggtccgccaggctccaggaaaggggctcgagtgggtgtccggtatttatagtgatggtagtggcacatactctgcagactccgtgaagggccgattcaccatctccagagacaacgccaagaacacggtgtatctgcaaatgaacagcctgaaacctgacgacacggcactgtattactgtgcaaaagggaaacctagtggtagttactacccctgggatgactactggggccaggggacccaggtcaccgtctcctca

SEQ ID NO: 5097 - DNA, 366 bp, synthetic construct
  source 1..366: mol_type = other DNA
gaggtgcagctggtggagtctgggggaggcttggcgcagcctggggggtctctgagactctcctgtgcagcctctggattcaccttcagtaactatgccatgagctgggcccgccaggctccaggaaaggggctcgagtgggtgtccggtatttatagtgatggtagtggcacatactatgcagactccgtgaagggccgattcaccatctccagagacaacgccaagaacacggtgtatctgcaaatgaacagcctgaaacctgaggacacggcactgtattactgtgcgaaaggtcgtaatagtggtagttactacccctttgatgactactggggccaggggacccaggtcaccgtctcctca

SEQ ID NO: 5098 - DNA, 366 bp, synthetic construct
  source 1..366: mol_type = other DNA
gaggtgcagctggtggagtctgggggaggcttggcgcagcctggggggtctctgagactctcctgtgcagcctctggattcaccttcagtaactatgccatgagctgggcccgccaggctccaggaaaggggctcgagtgggtgtccggtatttatagtgatagtagtggcacatactatgcagactccgtgaagggccgattcaccatctccagagacaacgccaagaacacggtgtatctgcaaatgaacagcctgaaacctgaggacacggcactgtattactgtgcaaagggtcgagggagtggtagttactacccctttgatgcctactggggccaggggacccaggtcaccgtctcctca

SEQ ID NO: 5099 - DNA, 366 bp, synthetic construct; identical to SEQ ID NO: 4338
  source 1..366: mol_type = other DNA

SEQ ID NO: 5100 - DNA, 366 bp, synthetic construct
  source 1..366: mol_type = other DNA
gaggtgcagctggtggagtctgggggaggcttggcgcagcctggggggtctctgagactctcctgtgcagcctctggattcaccttcagtaactatgccatgagctgggcccgccaggctccaggaaaggggctcgagtgggtgtccggtatttatagtgatagtagtggcacatactatgcagactccgtgaagggccgattcaccatctccagagacaacgccaagaacacggtgtatctgcaaatgaacagcctgaaacctgaggacacggcactgtattactgtgcaaagggtcgagggagtggtagttactacccccttgatgactactggggccaggggacccaggtcaccgtctcctca

SEQ ID NO: 5101 - DNA, 366 bp, synthetic construct
  source 1..366: mol_type = other DNA
gaggtgcagctggtggagtctgggggaggcttggcgcagcctggggggtctctgagactctcctgtgcagcctctggattcaccttcagtaactatgccatgagctgggcccgccaggctccaggaaaggggctcgagtgggtgtccggtatttatagtgatagtagtggcacatactatgcagactccgtgaagggccgattcaccatctccagagacaacgccaagaacacggtgtatctgcaaatgaacagcctgaaacctgaggacacggcactgtattactgtgcaaagggtcgagggagtggtggttactacccctttgatgactactggggccaggggacccaggtcaccgtctcctca

SEQ ID NO: 5102 - DNA, 366 bp, synthetic construct
  source 1..366: mol_type = other DNA
gaggtgcagctggtggagtctgggggaggcttggcgcagcctggggggtctctgagactctcctgtgcagcctctggattcaccttcagtaactatgccatgagctgggcccgccaggctccaggaaaggggctcgagtgggtgtccggtatttatagtgatagtagtggcacatactatgcagactccgtgaagggccgattcaccatctccagagacaacgccaagaacacggtgtatctgcaaatgaacagcctgaaacctgaggacacggcactgtattactgtgcaaagggtcgagggagtggtagttactacccctttgaggactactggggccaggggacccaggtcaccgtctcctca

SEQ ID NO: 5103 - DNA, 366 bp, synthetic construct
  source 1..366: mol_type = other DNA
gaggtgcagctggtggagtctgggggaggcttggcgcagcctggggggtctctgagactctcctgtgcagcctctggattcaccttcagtaactatgccatgagctgggcccgccaggctccaggaaaggggctcgagtgggtgtccggtatttatagtgatagtagtggcacatactatgcagactccgtgaagggccgattcaccatctccagagacaacgccaagaacacggtgtatctgcaaatgaacagcctgaaacctgaggacacggcactgtattactgtgcaaagggtcgagggagtggtagttactaccccattgatgactactggggccaggggacccaggtcaccgtctcctca

SEQ ID NO: 5104 - DNA, 366 bp, synthetic construct
  source 1..366: mol_type = other DNA
gaggtgcagctggtggagtctgggggaggcttggcgcagcctggggggtctctgagactctcctgtgcagcctctggattcaccttcagtaactatgccatgagctgggcccgccaggctccaggaaaggggctcgagtgggtgtccggtatttatagtgatagtagtggcacatactatgcagactccgtgaagggccgattcaccatctccagagacaacgccaagaacacggtgtatctgcaaatgaacagcctgaaacctgaggacacggcactgtattactgtgcaaagggtcgagggaggggtagttactacccctttgatgactactggggccaggggacccaggtcaccgtctcctca

SEQ ID NO: 5105 - DNA, 366 bp, synthetic construct
  source 1..366: mol_type = other DNA
gaggtgcagctggtggagtctgggggaggcttggcgcagcctggggggtctctgagactctcctgtgcagcctctggattcaccttcagtaactatgccatgagctgggcccgccaggctccaggaaaggggctcgagtgggtgtccggtatttatagtgatggtagtggcacatactatgcagactccgtgaagggccgattcaccatctccagagacaacgccaagaacacggtgtatctgcaaatgaacagcctgaaacctgaggacacggcactgtattactgttcaaaagggaggggtagtggtagttactacccctgggatgactactggggccaggggacccaggtcaccgtctcctca

SEQ ID NO: 5106 - DNA, 366 bp, synthetic construct
  source 1..366: mol_type = other DNA
gaggtgcagctggtggagtctgggggaggcttggcgcagcctggggggtctctgagactctcctgtgcagcctctggattcaccttcagtaactatgccatgagctgggcccgccaggctccaggaaaggggctcgagtgggtgtccggtatttatagtgatagtagtggcacatactatgcagactccgtgaagggccgattcaccatctccagagacaacgccaagaacacggtgtatctgcaaatgaacagcctgaaacctgaggacacggcactgtattactgtgcaaagggtcgagggagtggtagttacgacccctttgatgactactggggccaggggacccaggtcaccgtctcctca

SEQ ID NO: 5107 - DNA, 366 bp, synthetic construct
  source 1..366: mol_type = other DNA
gaggtgcagctggtggagtctgggggaggcttggcgcagcctggggggtctctgagactctcctgtgcagcctctggattcaccttcagtaactatgccatgagctgggcccgccaggctccaggaaaggggctcgagtgggtgtccggtatttatagtgatagtagtggcacatactatgcagactccgtgaagggccgattcaccatctcaagagacaacgccaagaacacggtttatctgcaaatgaacagcctgaaacctgaggacacggcattgtattactgttcaaagggtcgagggagtggtagttactacccctttgatgactactggggccaggggacccaggtcaccgtctcctca

SEQ ID NO: 5108 - DNA, 366 bp, synthetic construct
  source 1..366: mol_type = other DNA
gaggtgcagctggtggagtctgggggaggcttggcgcagcctggggggtctctgagactctcctgtgcagcctctggattcaccttcagtaactatgccatgagctgggcccgccaggctccaggaaaggggctcgagtgggtgtccggtatttatagtgatagtagtggcacatactatgcagactccgtgaagggccgattcaccatctccagagacaacgccaagaacacggtgtatctgcaaatgaacagcctgaaacctgaggacacggcactgtattactgtgcaaagggtcgagggagtggtagttactacccctttgatgtctactggggccaggggacccaggtcaccgtctcctca

SEQ ID NO: 5109 - DNA, 366 bp, synthetic construct
  source 1..366: mol_type = other DNA
gaggtgcagctggtggagtctgggggaggcttggcgcagcctggggggtctctgagactctcctgtgcagcctctggattcaccttcagtaactatgccatgagctgggcccgccaggctccaggaaaggggctcgagtgggtgtccggtatttatagtgatggtagtggcacatactatgcagactccgtgaagggccgattcaccatctccagagacaacgccaagaacacggtgtatctgcaaatgaacagcctgaaacctgaggacacggcactgtattactgtgaaaaagggaggggtagtggtagttactacccctgggatgactactggggccaggggacccaggtcaccgtctcctca

SEQ ID NO: 5110 - DNA, 366 bp, synthetic construct
  source 1..366: mol_type = other DNA
gaggtgcagctggtggagtctgggggaggcttggcgcagcctggggggtctctgagactctcctgtgcagcctctggattcaccttcagtaactatgccatgagctgggcccgccaggctccaggaaaggggctcgagtgggtgtccggtatttatagtgatagtagtggcacatactatgcagactccgtgaagggccgattcaccatctccagagacaacgccaagaacacggtgtatctgcaaatgaacagcctgaaacctgaggacacggcactgtattactgtgcaacgggtcgagggagtggtagttactacccctttgatgactactggggccaggggacccaggtcaccgtctcctca

SEQ ID NO: 5111 - DNA, 366 bp, synthetic construct
  source 1..366: mol_type = other DNA
gaggtgcagctggtggagtctgggggaggcttggcgcagcctggggggtctctgagactctcctgtgcagcctctggattcaccttcagtaactatgccatgagctgggcccgccaggctccaggaaaggggctcgagtgggtgtccggtatttatagtgatagtagtggcacatactatgcagactccgtgaagggccgattcaccatctccagagacaacgccaagaacacggtgtatctgcaaatgaacagcctgaaacctgaggacacggcactgtattactgtgcaaagggtcgagggagtggtagttactacccctttgatgaccactggggccaggggacccaggtcaccgtctcctca

SEQ ID NO: 5112 - DNA, 366 bp, synthetic construct
  source 1..366: mol_type = other DNA
gaggtgcagctggtggagtctgggggaggcttggtgcaacctggggggtctctgagattgtcctgtgcagcctctggattcaccttcagtaactatgccatgagctgggcccgccaggctccaggaaaggggctcgagtgggtgtccggtatttatagtgatggtagtggcacatactatgcagactccgtgaagggccgattcaccatctccagagacaacgccaagaacacggtgtatctgcaaatgaacagcctaaaacctgaggacacggcactgtattactgtgcgaaaggtcgtaatagtggtagttactacccctttgatgactactggggccaggggacccaggtcaccgtctcctca

SEQ ID NO: 5113 - DNA, 366 bp, synthetic construct
  source 1..366: mol_type = other DNA
gaggtgcagctggtggagtctgggggaggcttggcgcagcctggggggtctctgagactctcctgtgcagcctctggattcaccttcagtaactatgccatgagctggacccgccaggctccaggaaaggggctcgagtgggtgtccggtatttatagtgatggtagtggcacatactatgcagactccgtgaagggccgattcaccatctccagagacaacgccaagaacacggtgtatctgcaaatgaacagcctgaaacctgaggacacggcactgtattactgtgcgaaaggtcgtaatagtggtagttactacccctttgatgactactggggccaggggacccaggtcaccgtctcctca

SEQ ID NO: 5114 - protein, 122 aa, synthetic construct; identical to SEQ ID NO: 4559

SEQ ID NO: 5115 - protein, 122 aa, synthetic construct; identical to SEQ ID NO: 4558

SEQ ID NO: 5116 - protein, 122 aa, synthetic construct; identical to SEQ ID NO: 434

SEQ ID NO: 5117 - protein, 122 aa, synthetic construct; identical to SEQ ID NO: 4458

SEQ ID NO: 5118 - protein, 122 aa, synthetic construct; identical to SEQ ID NO: 4535

SEQ ID NO: 5119 - protein, 15 aa, synthetic construct
  VARIANT 1: note = A, V or S
  VARIANT 2: note = K or T
  VARIANT 4: note = R, A or K
  VARIANT 5: note = G, H, N or R
  VARIANT 8: note = S or G
  VARIANT 12: note = W, F or L
  VARIANT 14: note = D or E
  VARIANT 15: note = Y or V
XXGXXSGXYYPXDXX

SEQ ID NO: 5120 - protein, 122 aa, synthetic construct; identical to SEQ ID NO: 4546

SEQ ID NO: 5121 - protein, 122 aa, synthetic construct; identical to SEQ ID NO: 4547

SEQ ID NO: 5122 - protein, 122 aa, synthetic construct; identical to SEQ ID NO: 4548

SEQ ID NO: 5123 - protein, 111 aa, synthetic construct; identical to SEQ ID NO: 356

SEQ ID NO: 5124 - protein, 111 aa, synthetic construct; identical to SEQ ID NO: 362

SEQ ID NO: 5125 - protein, 111 aa, synthetic construct; identical to SEQ ID NO: 368

SEQ ID NO: 5126 - protein, 111 aa, synthetic construct; identical to SEQ ID NO: 371

SEQ ID NO: 5127 - protein, 111 aa, synthetic construct; identical to SEQ ID NO: 374

SEQ ID NO: 5128 - protein, 111 aa, synthetic construct; identical to SEQ ID NO: 378

SEQ ID NO: 5129 - protein, 111 aa, synthetic construct; identical to SEQ ID NO: 28

SEQ ID NO: 5130 - protein, 111 aa, synthetic construct; identical to SEQ ID NO: 398

SEQ ID NO: 5131 - protein, 111 aa, synthetic construct; identical to SEQ ID NO: 399

SEQ ID NO: 5132 - protein, 111 aa, synthetic construct; identical to SEQ ID NO: 400

SEQ ID NO: 5133 - protein, 111 aa, synthetic construct; identical to SEQ ID NO: 401

SEQ ID NO: 5134 - protein, 111 aa, synthetic construct; identical to SEQ ID NO: 402

SEQ ID NO: 5135 - protein, 123 aa, synthetic construct; identical to SEQ ID NO: 513

SEQ ID NO: 5136 - protein, 123 aa, synthetic construct; identical to SEQ ID NO: 516

SEQ ID NO: 5137 - protein, 123 aa, synthetic construct; identical to SEQ ID NO: 518

SEQ ID NO: 5138 - protein, 123 aa, synthetic construct; identical to SEQ ID NO: 519

SEQ ID NO: 5139 - protein, 123 aa, synthetic construct; identical to SEQ ID NO: 525

SEQ ID NO: 5140 - protein, 123 aa, synthetic construct; identical to SEQ ID NO: 529

SEQ ID NO: 5141 - protein, 123 aa, synthetic construct; identical to SEQ ID NO: 539

SEQ ID NO: 5142 - protein, 123 aa, synthetic construct; identical to SEQ ID NO: 541

SEQ ID NO: 5143 - protein, 123 aa, synthetic construct; identical to SEQ ID NO: 542

SEQ ID NO: 5144 - protein, 123 aa, synthetic construct; identical to SEQ ID NO: 543

SEQ ID NO: 5145 - protein, 123 aa, synthetic construct; identical to SEQ ID NO: 544

SEQ ID NO: 5146 - protein, 122 aa, synthetic construct; identical to SEQ ID NO: 4451

SEQ ID NO: 5147 - protein, 122 aa, synthetic construct; identical to SEQ ID NO: 4450

SEQ ID NO: 5148 - protein, 122 aa, synthetic construct; identical to SEQ ID NO: 138

SEQ ID NO: 5149 - protein, 122 aa, synthetic construct; identical to SEQ ID NO: 4348

SEQ ID NO: 5150 - protein, 122 aa, synthetic construct; identical to SEQ ID NO: 4427

SEQ ID NO: 5151 - protein, 122 aa, synthetic construct; identical to SEQ ID NO: 4438

SEQ ID NO: 5152 - protein, 122 aa, synthetic construct; identical to SEQ ID NO: 4439

SEQ ID NO: 5153 - protein, 122 aa, synthetic construct; identical to SEQ ID NO: 4440

SEQ ID NO: 5154 - protein, 111 aa, synthetic construct; identical to SEQ ID NO: 56

SEQ ID NO: 5155 - protein, 111 aa, synthetic construct; identical to SEQ ID NO: 62

SEQ ID NO: 5156 - protein, 111 aa, synthetic construct; identical to SEQ ID NO: 70

SEQ ID NO: 5157 - protein, 111 aa, synthetic construct; identical to SEQ ID NO: 73

SEQ ID NO: 5158 - protein, 111 aa, synthetic construct; identical to SEQ ID NO: 77

SEQ ID NO: 5159 - protein, 111 aa, synthetic construct; identical to SEQ ID NO: 81

SEQ ID NO: 5160 - protein, 111 aa, synthetic construct; identical to SEQ ID NO: 12

SEQ ID NO: 5161 - protein, 111 aa, synthetic construct; identical to SEQ ID NO: 101

SEQ ID NO: 5162 - protein, 111 aa, synthetic construct; identical to SEQ ID NO: 102

SEQ ID NO: 5163 - protein, 111 aa, synthetic construct; identical to SEQ ID NO: 103

SEQ ID NO: 5164 - protein, 111 aa, synthetic construct; identical to SEQ ID NO: 104

SEQ ID NO: 5165 - protein, 111 aa, synthetic construct; identical to SEQ ID NO: 105

SEQ ID NO: 5166 - protein, 123 aa, synthetic construct; identical to SEQ ID NO: 218

SEQ ID NO: 5167 - protein, 123 aa, synthetic construct; identical to SEQ ID NO: 221

SEQ ID NO: 5168 - protein, 123 aa, synthetic construct; identical to SEQ ID NO: 223

SEQ ID NO: 5169 - protein, 123 aa, synthetic construct; identical to SEQ ID NO: 224

SEQ ID NO: 5170 - protein, 123 aa, synthetic construct; identical to SEQ ID NO: 230

SEQ ID NO: 5171 - protein, 123 aa, synthetic construct; identical to SEQ ID NO: 234

SEQ ID NO: 5172 - protein, 123 aa, synthetic construct; identical to SEQ ID NO: 244

SEQ ID NO: 5173 - protein, 123 aa, synthetic construct; identical to SEQ ID NO: 246

SEQ ID NO: 5174 - protein, 123 aa, synthetic construct; identical to SEQ ID NO: 247

SEQ ID NO: 5175 - protein, 123 aa, synthetic construct; identical to SEQ ID NO: 249

SEQ ID NO: 5176 - protein, 123 aa, synthetic construct; identical to SEQ ID NO: 250

SEQ ID NO: 5177 - DNA, 366 bp, synthetic construct; identical to SEQ ID NO: 5113
  source 1..366: mol_type = other DNA

SEQ ID NO: 5178 - DNA, 366 bp, synthetic construct; identical to SEQ ID NO: 5112
  source 1..366: mol_type = other DNA

SEQ ID NO: 5179 - DNA, 366 bp, synthetic construct; identical to SEQ ID NO: 1945
  source 1..366: mol_type = other DNA

SEQ ID NO: 5180 - DNA, 366 bp, synthetic construct; identical to SEQ ID NO: 5009
  source 1..366: mol_type = other DNA

SEQ ID NO: 5181 - DNA, 366 bp, synthetic construct; identical to SEQ ID NO: 5088
  source 1..366: mol_type = other DNA

SEQ ID NO: 5182 - DNA, 366 bp, synthetic construct; identical to SEQ ID NO: 5100
  source 1..366: mol_type = other DNA

SEQ ID NO: 5183 - DNA, 366 bp, synthetic construct; identical to SEQ ID NO: 5101
  source 1..366: mol_type = other DNA

SEQ ID NO: 5184 - DNA, 366 bp, synthetic construct; identical to SEQ ID NO: 5102
  source 1..366: mol_type = other DNA

SEQ ID NO: 5185 - DNA, 333 bp, synthetic construct; identical to SEQ ID NO: 1860
  source 1..333: mol_type = other DNA

SEQ ID NO: 5186 - DNA, 333 bp, synthetic construct; identical to SEQ ID NO: 1866
  source 1..333: mol_type = other DNA

SEQ ID NO: 5187 - DNA, 333 bp, synthetic construct; identical to SEQ ID NO: 1874
  source 1..333: mol_type = other DNA

SEQ ID NO: 5188 - DNA, 333 bp, synthetic construct; identical to SEQ ID NO: 1877
  source 1..333: mol_type = other DNA

SEQ ID NO: 5189 - DNA, 333 bp, synthetic construct; identical to SEQ ID NO: 1882
  source 1..333: mol_type = other DNA

SEQ ID NO: 5190 - DNA, 333 bp, synthetic construct; identical to SEQ ID NO: 1886
  source 1..333: mol_type = other DNA

SEQ ID NO: 5191 - DNA, 333 bp, synthetic construct; identical to SEQ ID NO: 23
  source 1..333: mol_type = other DNA

SEQ ID NO: 5192 - DNA, 333 bp, synthetic construct; identical to SEQ ID NO: 1907
  source 1..333: mol_type = other DNA

SEQ ID NO: 5193 - DNA, 333 bp, synthetic construct; identical to SEQ ID NO: 1908
  source 1..333: mol_type = other DNA

SEQ ID NO: 5194 - DNA, 333 bp, synthetic construct; identical to SEQ ID NO: 1909
  source 1..333: mol_type = other DNA

SEQ ID NO: 5195 - DNA, 333 bp, synthetic construct; identical to SEQ ID NO: 1910
  source 1..333: mol_type = other DNA

SEQ ID NO: 5196 - DNA, 333 bp, synthetic construct; identical to SEQ ID NO: 1911
  source 1..333: mol_type = other DNA

SEQ ID NO: 5197 - DNA, 369 bp, synthetic construct; identical to SEQ ID NO: 2025
  source 1..369: mol_type = other DNA

SEQ ID NO: 5198 - DNA, 369 bp, synthetic construct; identical to SEQ ID NO: 2029
  source 1..369: mol_type = other DNA

SEQ ID NO: 5199 - DNA, 369 bp, synthetic construct; identical to SEQ ID NO: 2031
  source 1..369: mol_type = other DNA

SEQ ID NO: 5200 - DNA, 369 bp, synthetic construct; identical to SEQ ID NO: 2032
  source 1..369: mol_type = other DNA

SEQ ID NO: 5201 - DNA, 369 bp, synthetic construct; identical to SEQ ID NO: 2038
  source 1..369: mol_type = other DNA

SEQ ID NO: 5202 - DNA, 369 bp, synthetic construct; identical to SEQ ID NO: 2042
  source 1..369: mol_type = other DNA

SEQ ID NO: 5203 - DNA, 369 bp, synthetic construct; identical to SEQ ID NO: 2052
  source 1..369: mol_type = other DNA

SEQ ID NO: 5204 - DNA, 369 bp, synthetic construct; identical to SEQ ID NO: 2054
  source 1..369: mol_type = other DNA

SEQ ID NO: 5205 - DNA, 369 bp, synthetic construct; identical to SEQ ID NO: 2055
  source 1..369: mol_type = other DNA

SEQ ID NO: 5206 - DNA, 369 bp, synthetic construct; identical to SEQ ID NO: 2057
  source 1..369: mol_type = other DNA

SEQ ID NO: 5207 - DNA, 369 bp, synthetic construct; identical to SEQ ID NO: 2058
  source 1..369: mol_type = other DNA

SEQ ID NO: 5208 - protein, 16 aa, synthetic construct
  VARIANT 3: note = S or T
  VARIANT 4: note = D, N, Y or K
  VARIANT 5: note = F or V
  VARIANT 6: note = L or P
  VARIANT 7: note = I or L
  VARIANT 9: note = T, I or A
  VARIANT 10: note = T, S or A
  VARIANT 13: note = A or G
  VARIANT 14: note = Y or H
AAXXXXXAXXISXXDY

SEQ ID NO: 5209 - protein, 8 aa, synthetic construct
  VARIANT 5: note = A or S
  VARIANT 6: note = S, W or D
  VARIANT 7: note = F, N or Y
GRTFXXXG

SEQ ID NO: 5210 - protein, 8 aa, synthetic construct
  VARIANT 3: note = Q, R or G
  VARIANT 4: note = S or G
ISXXGGRT